(19) United States
(12) Patent Application Publication
(10) Pub. No.: US 2012/0054917 A1
(43) Pub. Date: Mar. 1, 2012

(54) METHOD FOR IMPROVING BIOMASS YIELD

(76) Inventors: Steven John Hanley, Harpenden (GB); Angela Karp, Harpenden (GB)

(21) Appl. No.: 13/143,842

(22) PCT Filed: Jan. 11, 2010
(86) PCT No.: PCT/GB2010/000025

§ 371 Date: Nov. 11, 2011

(30) Foreign Application Priority Data
Jan. 9, 2009 (GB) 0900334.4
Jan. 9, 2009 (GB) 0900336.9
Jan. 9, 2009 (GB) 0900338.5
Jan. 9, 2009 (GB) 0900339.3
Jan. 9, 2009 (GB) 0900341.9
Jan. 9, 2009 (GB) 0900342.7
Jan. 9, 2009 (GB) 0900343.5
Jan. 9, 2009 (GB) 0900344.3
Jan. 9, 2009 (GB) 0900345.0
Jan. 9, 2009 (GB) 0900352.6
Jan. 9, 2009 (GB) 0900353.4

(51) Int. Cl. A01H 5/00; C12Q 1/68; C12N 5/10; A01H 1/06; C12N 15/82

(52) U.S. Cl. 800/290; 800/298; 435/320.1; 435/419; 435/6.11

(57) ABSTRACT

A method for predicting harvestable biomass yield in a crop comprising: genotyping a sample obtained from a crop plant for one or more markers genetically linked to a polynucleotide sequence having at least 50, 55, 60, 65, 70, 75, 80, 85, 90, 95, 97, 98, 99 or 100% identity to SEQ BD NO 1, 2, 3, 4, 5, 6, 7, 8, 9, 10, 11, 12, 13, 14, 15, 16, 17, 18, 19, 20, 21, 22, 23, 24 or 25, whereby the markers individually or collectively identify a haplotype associated with yield in a plurality of crop plants and correlating the haplotype with the harvested biomass yield.

### FIELD OF THE INVENTION

[0001] The present invention relates to methods for improving harvestable biomass yield in plants

### BACKGROUND TO THE INVENTION

[0002] The present invention relates generally to the field of molecular biology and concerns a method for increasing total harvestable biomass yield in field-grown plants. More specifically, the present invention concerns a method for increasing total harvestable biomass yield by transfer, through conventional genetics or transgenesis, of a specific genomic region which confers enhanced harvestable yield in field-grown plants.

[0003] The total biomass produced above-ground by a plant can be harvested and used as feedstock for food, forage, bioenergy (including heat and power, transport biofuels and biogas), biomaterials and biorefineries.

[0004] Total harvestable biomass yield is calculated according to the plants parts that constitute relevant harvestable product, the most precise being the use of only one part (e.g. grain) and the most generic when the total above ground biomass is used.

[0005] In food crops the most important aspect is the yield in terms of harvestable edible portion which ranges from seed, grain and fruits to all types of vegetative parts for vegetable and salad crops (e.g. leaves, roots tubers, modified inflorescences etc). For forage there may be additional parts of the plant that animals can eat or the whole crop may be relevant.

[0006] The production of first generation liquid biofuels requires easily accessible sugars, starches or oils. As these are present in harvestable food portions, the relevant total yield can be calculated according to the relevant edible food portions.

[0007] In contrast, for many other end-uses, all the above ground parts may be harvested and utilised—e.g biomass for bioenergy, biomass for advanced generation biofuels and biomass for biorefineries. Whether the total plant is harvested with or without leaves and with or without flowers depends on the crop and precise end-use function.

[0008] Selective breeding has been employed for centuries to improve, or attempt to improve, phenotypic traits of agronomic and economic interest in plants such as yield. Generally speaking, selective breeding involves the selection of individuals to serve as parents of the next generation on the basis of one or more phenotypic traits of interest. However, such phenotypic selection is frequently complicated by non-genetic factors that can impact the phenotype(s) of interest. Non-genetic factors that can have such effects include, but are not limited to environmental influences such as soil type and quality, rainfall, temperature range, and others.

[0009] Variation in agronomic traits falls into two categories: qualitative and quantitative. The term “qualitative trait” is used when variation in the trait falls into discrete categories. Qualitative variation of this kind is normally under the control of one or two genes whose inheritance can be simply monitored in a cross. However, the majority of traits of interest to breeders, including total harvestable biomass yield, are quantitative in nature and are under the control of several genes each of which may have an important but small effect on the trait. The effects of each the genes, which may act independently or interact with each other in different ways, are influenced by the environment. Consequently, harvestable biomass yield is measured as a quantitative character and genomic regions that influence yield are referred to as quantitative trait loci (QTL).

[0010] It can be very difficult to map the genetic loci that contribute to the expression of quantitative traits. For QTL analysis the progeny of a given cross may be analysed for the trait and each individual assigned a score depending on the phenotype observed. All the individuals in the mapping population are then screened using molecular markers. Association between markers and the trait scores are searched for using software packages. Because of the environmental influence, the mapping population needs to be as big as possible and large numbers of molecular markers need to be used. Moreover, the mapping population should be grown and assessed at more than one site to ensure that robust QTL have been identified. Because of the nature of QTL, for a given complex trait such as yield, several QTL may be identified in different locations on the genetic map in a single cross. Attention is focussed on the QTL which contribute most to the heritable variation that is observed in the population. If the same QTL come out strongest when the population is grown at another site, confidence of their importance is gained. By nature, QTL mapping is a long term process and very resource intensive.

### SUMMARY

[0011] This disclosure concerns markers that define alleles of a gene at a quantitative trait locus (QTL) associated with improved harvestable biomass yield in crop plants. Methods for predicting harvestable biomass yield in a crop plant, for example, by determining a contribution to harvestable biomass yield by the allele, using the disclosed markers is disclosed. Kits for performing such methods also form part of the invention. Transgenic crop plants comprising an exogenous gene associated with harvestable biomass yield are disclosed. Transgenic crop plants expressing a recombinant polypeptide associated with harvestable biomass yield also form part of the invention.

[0012] The present invention relates to Xyld1, Xyld2, Xyld3, Xyld4, Xyld5, Xyld6, Xyld7, Xyld8, Xyld9 and Xyld10 polynucleotides and polypeptides and homologues thereof, in particular, to these genes found in Populus and Salix and homologues thereof.

[0013] Examples of polynucleotides and polypeptides of Xyld1, Xyld2, Xyld3, Xyld4, Xyld5, Xyld6, Xyld7, Xyld8, Xyld9 and Xyld10 are shown in the Table below:

| | | Salix | Salix | Salix | Salix |
|---|---|---|---|---|---|
| | Populus | Allele A | Allele A | Allele C | Allele C |
| | polynucleotide | polynucleotide | polypeptide | polynucleotide | polypeptide |
| | sequence | sequence | sequence | sequence | sequence |
| Xyld1 | SEQ ID NO. 4 | SEQ ID NO. 5 | SEQ ID NO. 27 | | |
| Xyld2 | SEQ ID NO. 6 | SEQ ID NO. 7 | SEQ ID NO. 28 | | |
| Xyld3 | SEQ ID NO. 8 | SEQ ID NO. 9 | SEQ ID NO. 29 | | |
| Xyld4 | SEQ ID NO. 10 | SEQ ID NO. 11 | SEQ ID NO. 30 | SEQ ID NO. 12 | SEQ ID NO. 31 |
| Xyld5 | SEQ ID NO. 13 | | | | |
| Xyld6 | SEQ ID NO. 14 | SEQ ID NO. 15 | SEQ ID NO. 32 | SEQ ID NO. 16 | SEQ ID NO. 33 |
| Xyld7 | SEQ ID NO. 3 | SEQ ID NO. 2 | | SEQ ID NO. 1 | SEQ ID NO. 26 |
| Xyld8 | SEQ ID NO. 17 | SEQ ID NO. 18 | SEQ ID NO. 34 | SEQ ID NO. 19 | SEQ ID NO. 35 |
| Xyld9 | SEQ ID NO. 20 | SEQ ID NO. 21 | SEQ ID NO. 36 | SEQ ID NO. 22 | SEQ ID NO. 37 |
| Xyld10 | SEQ ID NO. 23 | SEQ ID NO. 24 | SEQ ID NO. 38 | SEQ ID NO. 25 | SEQ ID NO. 39 |

[0014] Polynucleotides useful in the invention may comprise nucleotide sequences having at least 50, 55, 60, 65, 70, 75, 80, 85, 90, 95, 97, 98, 99 or 100% identity to the Xyld1, Xyld2, Xyld3, Xyld4, Xyld5, Xyld6, Xyld7, Xyld8, Xyld9 and Xyld10 polynucleotides.

[0015] Polypeptides useful in the invention may comprise amino acid sequences having at least 50, 55, 60, 65, 70, 75, 80, 85, 90, 95, 97, 98, 99 or 100% identity to the Xyld1, Xyld2, Xyld3, Xyld4, Xyld5, Xyld6, Xyld7, Xyld8, Xyld9 and Xyld10 polypeptides.

[0016] In preferred aspects of the present invention, polynucleotides and polypeptides of the Salix allele C genes are provided for use in the invention.

[0017] In preferred aspects of the present invention, polynucleotide and polypeptide sequences of Xyld7, in particular Xyld7 allele C, are provided for use in the invention.

[0018] According to a first aspect of of the present invention there is provided Xyld1, Xyld2, Xyld3, Xyld4, Xyld5, Xyld6, Xyld7, Xyld8, Xyld9 and Xyld10 polynucleotides and polypeptides.

[0019] According to another aspect of the present invention there is provided a method for predicting harvestable biomass yield in a crop comprising: genotyping a sample obtained from a crop plant for one or more markers genetically linked to a polynucleotide sequence having at least 50, 55, 60, 65, 70, 75, 80, 85, 90, 95, 97, 98, 99 or 100% identity to SEQ ID NO 1, 2, 3, 4, 5, 6, 7, 8, 9, 10, 11, 12, 13, 14, 15, 16, 17, 18, 19, 20, 21, 22, 23, 24 or 25, whereby the markers individually or collectively identify a haplotype associated with yield in a plurality of crop plants and correlating the haplotype with the harvested biomass yield.

[0020] According to a further aspect of the present invention there is provided a method for predicting harvestable biomass yield in a crop comprising: genotyping a sample obtained from a crop plant for one or more markers genetically linked to a polynucleotide sequence having at least 50, 55, 60, 65, 70, 75, 80, 85, 90, 95, 97, 98, 99 or 100% identity to a nucleotide sequence encoding the polypeptide of SEQ ID NO 26, 27, 28, 29, 30, 31, 32, 33, 34, 35, 36, 37, 38 or 39, whereby the markers individually or collectively identify a haplotype associated with yield in a plurality of crop plants and correlating the haplotype with the harvested biomass yield.

[0021] According to a further aspect of the present invention there is provided a method for determining the contribution of an allele to harvestable biomass yield in a crop, wherein the allele is an allele of a polynucleotide sequence, said polynucleotide sequence having at least 50, 55, 60, 65, 70, 75, 80, 85, 90, 95, 97, 98, 99 or 100% identity to SEQ ID NO 1, 2, 3, 4, 5, 6, 7, 8, 9, 10, 11, 12, 13, 14, 15, 16, 17, 18, 19, 20, 21, 22, 23, 24 or 25, the method comprising: genotyping a sample obtained from a crop plant for one or more markers genetically linked to said polynucleotide, which markers individually or collectively identify a haplotype correlated with a contribution to harvestable biomass yield.

[0022] According to a further aspect of the present invention there is provided a method for determining the contribution of an allele to harvestable biomass yield in a crop, wherein the allele is an allele of a polynucleotide sequence, said polynucleotide sequence having at least 50, 55, 60, 65, 70, 75, 80, 85, 90, 95, 97, 98, 99 or 100% identity to a nucleotide sequence encoding the polypeptide of SEQ ID NO 26, 27, 28, 29, 30, 31, 32, 33, 34, 35, 36, 37, 38 or 39, the method comprising: genotyping a sample obtained from a crop plant for one or more markers genetically linked to said polynucleotide, which markers individually or collectively identify a haplotype correlated with a contribution to harvestable biomass yield.

[0023] According to a further aspect of the present invention there is provided a method of identifying an allele that is associated with harvestable biomass yield in a crop comprising: obtaining a sample from a crop plant; amplifying DNA present in said sample and detecting the presence of a polynucleotide sequence having at least 50, 55, 60, 65, 70, 75, 80, 85, 90, 95, 97, 98, 99 or 100% identity to SEQ ID NO 1, 2, 3, 4, 5, 6, 7, 8, 9, 10, 11, 12, 13, 14, 15, 16, 17, 18, 19, 20, 21, 22, 23, 24 or 25 in the amplified DNA.

[0024] According to a further aspect of the present invention there is provided a method of identifying an allele that is associated with harvestable biomass yield in a crop comprising: obtaining a sample from a crop plant; amplifying DNA present in said sample and detecting the presence of a polynucleotide sequence having at least 50, 55, 60, 65, 70, 75, 80, 85, 90, 95, 97, 98, 99 or 100% identity to a nucleotide sequence encoding the polypeptide of SEQ ID NO 26, 27, 28, 29, 30, 31, 32, 33, 34, 35, 36, 37, 38 or 39 in the amplified DNA.

[0025] According to a further aspect of the present invention there is provided a method of selecting a crop by marker assisted selection of an allele associated with harvestable biomass yield, wherein said allele is an allele of a polynucleotide sequence, said polynucleotide sequence having at least 50, 55, 60, 65, 70, 75, 80, 85, 90, 95, 97, 98, 99 or 100% identity to SEQ ID NO 1, 2, 3, 4, 5, 6, 7, 8, 9, 10, 11, 12, 13, 14, 15, 16, 17, 18, 19, 20, 21, 22, 23, 24 or 25, said method comprising: determining the presence of one or more markers, which markers are genetically linked to said polynucleotide.

[0026] According to a further aspect of the present invention there is provided a method of selecting a crop by marker assisted selection of an allele associated with harvestable biomass yield, wherein said allele is an allele of a polynucleotide sequence, said polynucleotide sequence having at least 50, 55, 60, 65, 70, 75, 80, 85, 90, 95, 97, 98, 99 or 100% identity to a nucleotide sequence encoding the polypeptide of SEQ ID NO 26, 27, 28, 29, 30, 31, 32, 33, 34, 35, 36, 37, 38 or 39, said method comprising: determining the presence of one or more markers, which markers are genetically linked to said polynucleotide.

[0027] According to a further aspect of the present invention there is provided an isolated nucleic acid sequence comprising a marker or plurality of markers associated with a QTL associated with harvestable biomass yield in a crop wherein the marker or plurality of markers are genetically linked to a polynucleotide sequence having at least 50, 55, 60, 65, 70, 75, 80, 85, 90, 95, 97, 98, 99 or 100% identity to SEQ ID NO 1, 2, 3, 4, 5, 6, 7, 8, 9, 10, 11, 12, 13, 14, 15, 16, 17, 18, 19, 20, 21, 22, 23, 24 or 25.

[0028] According to a further aspect of the present invention there is provided an isolated nucleic acid sequence comprising a marker or plurality of markers associated with a QTL associated with harvestable biomass yield in a crop wherein the marker or plurality of markers are genetically linked to a polynucleotide sequence having at least 50, 55, 60, 65, 70, 75, 80, 85, 90, 95, 97, 98, 99 or 100% identity to a nucleotide sequence encoding the polypeptide of SEQ ID NO 26, 27, 28, 29, 30, 31, 32, 33, 34, 35, 36, 37, 38 or 39.

[0029] According to a further aspect of the present invention there is provided a method for producing a transgenic crop plant, comprising introducing into an unmodified crop plant an exogenous polynucleotide, wherein said polynucleotide comprises a nucleotide sequence having at least 50, 55, 60, 65, 70, 75, 80, 85, 90, 95, 97, 98, 99 or 100% identity to SEQ ID NO 1, 2, 3, 4, 5, 6, 7, 8, 9, 10, 11, 12, 13, 14, 15, 16, 17, 18, 19, 20, 21, 22, 23, 24 or 25.

[0030] According to a further aspect of the present invention there is provided a method for producing a transgenic crop plant, comprising introducing into an unmodified crop plant an exogenous polynucleotide, wherein said polynucleotide comprises a nucleotide sequence having at least 50, 55, 60, 65, 70, 75, 80, 85, 90, 95, 97, 98, 99 or 100% identity to a nucleotide sequence encoding the polypeptide of SEQ ID NO 26, 27, 28, 29, 30, 31, 32, 33, 34, 35, 36, 37, 38 or 39.

[0031] According to a further aspect of the present invention there is provided a method for producing a transgenic crop plant that expresses a recombinant polypeptide encoded by a sequence having at least 50, 55, 60, 65, 70, 75, 80, 85, 90, 95, 97, 98, 99 or 100% identity to SEQ ID NO 1, 2, 3, 4, 5, 6, 7, 8, 9, 10, 11, 12, 13, 14, 15, 16, 17, 18, 19, 20, 21, 22, 23, 24 or 25, comprising introducing an exogenous polynucleotide comprising a cDNA encoding said recombinant polypeptide into an unmodified crop plant.

[0032] According to a further aspect of the present invention there is provided a method for producing a transgenic crop plant that expresses a recombinant polypeptide comprising an amino acid sequence having at least 50, 55, 60, 65, 70, 75, 80, 85, 90, 95, 97, 98, 99 or 100% identity to SEQ ID NO 26, 27, 28, 29, 30, 31, 32, 33, 34, 35, comprising introducing an exogenous polynucleotide comprising a cDNA encoding said recombinant polypeptide into an unmodified crop plant.

[0033] According to a further aspect of the present invention there is provided a transgenic crop plant comprising an exogenous gene, wherein said gene comprises a sequence having at least 50, 55, 60, 65, 70, 75, 80, 85, 90, 95, 97, 98, 99 or 100% identity to SEQ ID NO 1, 2, 3, 4, 5, 6, 7, 8, 9, 10, 11, 12, 13, 14, 15, 16, 17, 18, 19, 20, 21, 22, 23, 24 or 25.

[0034] According to a further aspect of the present invention there is provided a transgenic crop plant comprising an exogenous gene, wherein said gene comprises a sequence encoding a polypeptide, the polypeptide having at least 50, 55, 60, 65, 70, 75, 80, 85, 90, 95, 97, 98, 99 or 100% identity to the polypeptide of SEQ ID NO 26, 27, 28, 29, 30, 31, 32, 33, 34, 35, 36, 37, 38 or 39.

[0035] According to a further aspect of the present invention there is provided a transgenic crop plant expressing a recombinant polypeptide encoded by a sequence having at least 50, 55, 60, 65, 70, 75, 80, 85, 90, 95, 97, 98, 99 or 100% identity to SEQ ID NO 1, 2, 3, 4, 5, 6, 7, 8, 9, 10, 11, 12, 13, 14, 15, 16, 17, 18, 19, 20, 21, 22, 23, 24 or 25.

[0036] According to a further aspect of the present invention there is provided a transgenic crop plant expressing a recombinant polypeptide having at least 50, 55, 60, 65, 70, 75, 80, 85, 90, 95, 97, 98, 99 or 100% identity to SEQ ID NO 26, 27, 28, 29, 30, 31, 32, 33, 34, 35, 36, 37, 38 or 39.

[0037] According to a further aspect of the present invention there is provided a transgenic crop plant comprising a nucleotide sequence having at least 50, 55, 60, 65, 70, 75, 80, 85, 90, 95, 97, 98, 99 or 100% identity to SEQ ID NO 1, 2, 3, 4, 5, 6, 7, 8, 9, 10, 11, 12, 13, 14, 15, 16, 17, 18, 19, 20, 21, 22, 23, 24 or 25, wherein said nucleotide sequence is operably linked to a heterologous regulatory element.

[0038] According to a further aspect of the present invention there is provided a transgenic crop plant comprising a nucleotide sequence having at least 50, 55, 60, 65, 70, 75, 80, 85, 90, 95, 97, 98, 99 or 100% identity to a nucleotide sequence encoding the polypeptide of SEQ ID NO 26, 27, 28, 29, 30, 31, 32, 33, 34, 35, 36, 37, 38 or 39, wherein said nucleotide sequence is operably linked to a heterologous regulatory element.

[0039] According to a further aspect of the present invention there is provided a use of an exogenous polynucleotide comprising a sequence having at least 50, 55, 60, 65, 70, 75, 80, 85, 90, 95, 97, 98, 99 or 100% identity to SEQ ID NO 1, 2, 3, 4, 5, 6, 7, 8, 9, 10, 11, 12, 13, 14, 15, 16, 17, 18, 19, 20, 21, 22, 23, 24 or 25 or the corresponding cDNA sequence, for improving harvestable biomass yield of a crop plant by transformation of the crop plant with the exogenous polynucleotide.

[0040] According to a further aspect of the present invention there is provided a use of an exogenous polynucleotide comprising a sequence having at least 50, 55, 60, 65, 70, 75, 80, 85, 90, 95, 97, 98, 99 or 100% identity to a nucleotide sequence encoding the polypeptide of SEQ ID NO 26, 27, 28, 29, 30, 31, 32, 33, 34, 35, 36, 37, 38 or 39, for improving harvestable biomass yield of a crop plant by transformation of the crop plant with the exogenous polynucleotide.

[0041] According to a further aspect of the present invention there is provided a genetic construct comprising (a) a nucleotide sequence having at least 50, 55, 60, 65, 70, 75, 80, 85, 90, 95, 97, 98, 99 or 100% identity to SEQ ID NO 1, 2, 3, 4, 5, 6, 7, 8, 9, 10, 11, 12, 13, 14, 15, 16, 17, 18, 19, 20, 21, 22, 23, 24 or 25 or the corresponding cDNA sequence, and (b) a promoter sequence capable of directing expression of the protein encoded by the nucleotide sequence in a plant comprising the genetic construct.

[0042] According to a further aspect of the present invention there is provided a genetic construct comprising (a) a nucleotide sequence having at least 50, 55, 60, 65, 70, 75, 80, 85, 90, 95, 97, 98, 99 or 100% identity to a nucleotide sequence encoding the polypeptide of SEQ ID NO 26, 27, 28, 29, 30, 31, 32, 33, 34, 35, 36, 37, 38 or 39, and (b) a promoter sequence capable of directing expression of the protein encoded by the nucleotide sequence in a plant comprising the genetic construct.

[0043] According to a further aspect of the present invention there is provided a plant transformation vector comprising the genetic construct of the invention.

[0044] According to a further aspect of the present invention there is provided a plant or plant cell comprising a transformation vector of the invention.

[0045] In one or more embodiments of the invention, the marker is within an interval of less than 45, 40, 35, 30, 25, 20, 15, 10, 5, 4, 3, 2, 1 or 0 centimorgans (cM) from a nucleotide sequence having at least 50, 55, 60, 65, 70, 75, 80, 85, 90, 95, 97, 98, 99 or 100% identity to SEQ ID NO 1, 2, 3, 4, 5, 6, 7, 8, 9, 10, 11, 12, 13, 14, 15, 16, 17, 18, 19, 20, 21, 22, 23, 24 or 25.

[0046] In one or more embodiments of the invention, the marker is within an interval of less than 45, 40, 35, 30, 25, 20, 15, 10, 5, 4, 3, 2, 1 or 0 centimorgans (cM) from a nucleotide sequence having at least 50, 55, 60, 65, 70, 75, 80, 85, 90, 95, 97, 98, 99 or 100% identity to a nucleotide sequence encoding the polypeptide of SEQ ID NO 26, 27, 28, 29, 30, 31, 32, 33, 34, 35, 36, 37, 38 or 39.

[0047] Plants that are particularly useful in the methods of the invention include in particular monocotyledonous and dicotyledonous fodder crops, forage crops, ornamental crops, fruit crops, food crops, algae, forestry trees, bioenergy crops and biofuel crops including the following species and species hybrids: Acacia spp., Acer spp., Actinidia ssp., Agave spp., Agropyron spp., Agrostis spp., Allium spp., Alnus spp., Alopecurus spp., Amaranthus spp., Ananas spp., Apium spp., Arachis spp., Areca spp., Arundo spp., Arrhenatherum spp., Asparagus spp; Avena spp., Atriplex spp., Attalea spp., Beta spp., Betula spp., Brassica spp., Bromus spp., Bouteloua spp., Camelina spp., Camellia spp., Cannabis spp., Capsicum spp., Carica spp., Carex spp., Carthamus spp., Castanea spp., Carum spp., Cinnamomum spp., Citrus spp., Cocos spp., Coffea spp., Corchorus spp., Cotoneatser spp., Cucurbita spp., Cupressus spp., Cynodon spp., Daucus spp., Dactylis spp., Eucalyptus spp., Elaeis spp., Eleusine spp., Fagus spp., Festuca spp., Ficus spp., Fraxinus spp., Geranium spp., Ginkgo spp., Glycine spp., Gossypium spp., Helianthus spp., Hemerocallis spp., Heracleum spp., Hedysarum spp., Hibiscus spp., Hordeum spp., Indigo spp., Ipomoea spp., Lettuca spp., Jatropha spp., Lotus spp., Lactuca spp., Lathyrus spp., Lens spp., Linum spp., Lolium spp., Lupinus spp., Lezula spp., Lycopersicon spp., Malus spp., Manihot spp., Medicago spp., Melilotus spp., Mentha spp., Miscanthus spp., Musa spp., Nicotiana spp., Olea spp., Onobrychis spp., Ophiopogon spp., Oryza spp., Panicum spp., Papaver spp., Petunia spp., Phaseolus spp., Pennisetum spp., Phalaris spp., Phoenix spp., Phleum spp., Phyllostachys spp., Physalis spp., Panicum spp., Picea spp., Pinus spp., Pistacia spp., Pisum spp., Poa spp., Podocarpus spp., Pogmania spp., Populus spp., Prunus spp., Quercus spp., Ribes spp., Robinia spp., Rosa spp., Raphanus spp., Rheum spp., Ricinus spp., Rubus spp., Salix spp., Sequoia spp., Sesamum spp., Setaria spp., Saccharum spp., Sambucus spp., Secale spp., Sinapis spp., Solanum spp., Sorghum spp., Trifolium spp., Triticum spp., Triticosecale spp., Trisetum spp., Tagetes spp., Theobroma spp., Triadica spp., Vicia spp., Vitis spp., Vigna spp., Viola spp., Watsonia spp., Zea spp. amongst others.

[0048] According to another aspect of the present invention there is provided a polypetide having the amino acid sequence od SEQ ID NO:1.

[0049] The foregoing and other objects and features of the disclosures will become more apparent from the following detailed description, which proceeds with reference to the accompanying figures.

[0050] FIG. 1: shows the sequence of a QTL region in Populus associated with improved yield.

[0051] FIG. 2 shows the sequence of a QTL region in Salix associated with improved yield. The sequence is derived from allele A.

[0052] FIG. 3A: shows the nucleotide sequence of the Xyld1 polynucleotide of Populus (SEQ ID NO 4). SEQ ID NO 4 is located within the QTL region shown in FIG. 1.

[0053] FIG. 3B: shows the nucleotide sequence of the Xyld1 allele A polynucleotide of Salix (SEQ ID NO 5).

[0054] FIG. 3C: shows the amino acid sequence of the Xyld1 allele A polypeptide of Salix (SEQ ID NO 27).

[0055] FIG. 4A: shows the nucleotide sequence of the Xyld2 polynucleotide of Populus (SEQ ID NO 6). SEQ ID NO 6 is located within the QTL region shown in FIG. 1.

[0056] FIG. 4B: shows the nucleotide sequence of the Xyld2 allele A polynucleotide of Salix (SEQ ID NO 7).

[0057] FIG. 4C: shows the amino acid sequence of the Xyld2 allele A polypeptide of Salix (SEQ ID NO 28).

[0058] FIG. 5A: shows the nucleotide sequence of the Xyld3 polynucleotide of Populus (SEQ ID NO 8). SEQ ID NO 8 is located within the QTL region shown in FIG. 1.

[0059] FIG. 5B: shows the nucleotide sequence of the Xyld3 allele A polynucleotide of Salix (SEQ ID NO 9).

[0060] FIG. 5C: shows the amino acid sequence of the Xyld3 allele A polypeptide of Salix (SEQ ID NO 29).

[0061] FIG. 6A: shows the nucleotide sequence of the Xyld4 polynucleotide of Populus (SEQ ID NO 10). SEQ ID NO 10 is located within the QTL region shown in FIG. 1.

[0062] FIG. 6B: shows the nucleotide sequence of the Xyld4 allele A polynucleotide of Salix (SEQ ID NO 11).

[0063] FIG. 6C: shows the nucleotide sequence of the Xyld4 allele C polynucleotide of Salix (SEQ ID NO 12).

[0064] FIG. 6D: shows the amino acid sequence of the Xyld4 allele A polypeptide of Salix (SEQ ID NO 30).

[0065] FIG. 6E: shows the amino acid sequence of the Xyld4 allele C polypeptide of Salix (SEQ ID NO 31).

[0066] FIG. 7: shows the nucleotide sequence of the Xyld5 polynucleotide of Populus (SEQ ID NO 13). SEQ ID NO 13 is located within the QTL region shown in FIG. 1.

[0067] FIG. 8A: shows the nucleotide sequence of the Xyld6 polynucleotide of Populus (SEQ ID NO 14). SEQ ID NO 14 is located within the QTL region shown in FIG. 1.

[0068] FIG. 8B: shows the nucleotide sequence of the Xyld6 allele A polynucleotide of Salix (SEQ ID NO 15).

[0069] FIG. 8C: shows the nucleotide sequence of the Xyld6 allele C polynucleotide of Salix (SEQ ID NO 16).

[0070] FIG. 8D: shows the amino acid sequence of the Xyld6 allele A polypeptide of Salix (SEQ ID NO 32).

[0071] FIG. 8E: shows the amino acid sequence of the Xyld6 allele C polypeptide of Salix (SEQ ID NO 33).

[0072] FIG. 9A: shows the nucleotide sequence of the Xyld7 polynucleotide of Populus (SEQ ID NO 3). SEQ ID NO 3 is located within the QTL region shown in FIG. 1.

[0073] FIG. 9B: shows the nucleotide sequence of the Xyld7 allele A polynucleotide of Salix (SEQ ID NO 2).

[0074] FIG. 9C: shows the nucleotide sequence of the Xyld7 allele C polynucleotide of Salix (SEQ ID NO 1).

[0075] FIG. 9D: shows the nucleotide sequence of the Xyld7 allele A polynucleotide of Salix (SEQ ID NO 2) aligned with the Xyld7 allele C polynucleotide of Salix (SEQ ID NO 1) to indicate Gene Xyld7 allele A insertion region.

[0076] FIG. 9E: shows the amino acid sequence of the Xyld7 allele C polypeptide in Salix (SEQ ID NO 26).

[0077] FIG. 10A: shows the nucleotide sequence of the Xyld8 polynucleotide of Populus (SEQ ID NO 17). SEQ ID NO 17 is located within the QTL region shown in FIG. 1.

[0078] FIG. 10B: shows the nucleotide sequence of the Xyld8 allele A polynucleotide of Salix (SEQ ID NO 18).

[0079] FIG. 10C: shows the nucleotide sequence of the Xyld8 allele C polynucleotide of Salix (SEQ ID NO 19).

[0080] FIG. 10D: shows the amino acid sequence of the Xyld8 allele A polypeptide of Salix (SEQ ID NO 34).

[0081] FIG. 10E: shows the amino acid sequence of the Xyld8 allele C polypeptide of Salix (SEQ ID NO 35).

[0082] FIG. 11A: shows the nucleotide sequence of the Xyld9 polynucleotide of Populus (SEQ ID NO 20). SEQ ID NO 20 is located within the QTL region shown in FIG. 1.

[0083] FIG. 11B: shows the nucleotide sequence of the Xyld9 allele A polynucleotide of Salix (SEQ ID NO 21).

[0084] FIG. 11C: shows the nucleotide sequence of the Xyld9 allele C polynucleotide of Salix (SEQ ID NO 22).

[0085] FIG. 11D: shows the amino acid sequence of the Xyld9 allele A polypeptide of Salix (SEQ ID NO 36).

[0086] FIG. 11E: shows the amino acid sequence of the Xyld9 allele C polypeptide of Salix (SEQ ID NO 37).

[0087] FIG. 12A: shows the nucleotide sequence of the Xyld10 polynucleotide of Populus (SEQ ID NO 23). SEQ ID NO 23 is located within the QTL region shown in FIG. 1.

[0088] FIG. 12B: shows the nucleotide sequence of the Xyld10 allele A polynucleotide of Salix (SEQ ID NO 24).

[0089] FIG. 12C: shows the nucleotide sequence of the Xyld10 allele C polynucleotide of Salix (SEQ ID NO 25).

[0090] FIG. 12D: shows the amino acid sequence of the Xyld10 allele A polypeptide of Salix (SEQ ID NO 38).

[0091] FIG. 12E: shows the amino acid sequence of the Xyld10 allele C polypeptide of Salix (SEQ ID NO 39).

[0092] FIG. 13: shows QTL analysis of yield related traits in the K8 mapping population for a 5.1 cM region of chromosome X as delimited by markers X_{—}15341094 and X_{—}15945623. QTL confidence intervals are indicated by thick bars (1 LOD below peak) and lines (2 LOD below peak). The percentage of the variance explained by the QTL is shown in parentheses.

[0093] FIG. 14 shows representation of the public annotation of the poplar genomic sequence represented by the QTL region. Ten genes are predicted (not to scale).

[0094] FIG. 15 shows the QTL region of FIG. 1 wherein markers derived from the sequence that we used in QTL identification are indicated by bold type. Gene sequences are labelled and underlined.

[0095] FIG. 16 shows the QTL region of FIG. 2 wherein markers derived from the sequence that we used in QTL identification are indicated by bold type. Gene sequences are labelled and underlined.

[0096] FIG. 17 shows the QTL region of FIG. 2 wherein the sequence of Xyld7 allele A has been replaced with Xyld7 allele C.

[0097] FIG. 18 shows the sequence of a QTL region in Populus associated with improved yield wherein the poplar sequence is derived from the public sequence annotation of the poplar genome (www.phytozome.net.).

### DETAILED DESCRIPTION

[0098] The present invention relates to Xyld1, Xyld2, Xyld3, Xyld4, Xyld5, Xyld6, Xyld7, Xyld8, Xyld9 and Xyld10 polynucleotides and polypeptides and homologues thereof.

[0099] In preferred embodiments of the present invention, the polynucleotide comprises a nucleotide sequence which encodes a Salix allele C polypeptide selected from the group consisting of Xyld1, Xyld2, Xyld3, Xyld4, Xyld5, Xyld6, Xyld7, Xyld8, Xyld9 and Xyld10, or a homologue of said polynucleotide.

[0100] In preferred embodiments of the present invention, the polypeptide is a Salix allele C polypeptide selected from the group consisting of Xyld1, Xyld2, Xyld3, Xyld4, Xyld5, Xyld6, Xyld7, Xyld8, Xyld9 and Xyld10, or a homologue of said polypeptide.

[0101] The Xyld1 polynucleotide is shown in SEQ ID NO 4 and SEQ ID NO 5. SEQ ID NO 4 (as shown in FIG. 3A) shows a sequence of the gene in Populus and SEQ ID NO 5 (as shown in FIG. 3B) shows a sequence of the gene (allele A) in Salix. SEQ ID NO 27 (as shown in FIG. 3C) shows the Salix Xyld1 allele A polypeptide sequence.

[0102] The Xyld2 polynucleotide is shown in SEQ ID NO 6 and SEQ ID NO 7. SEQ ID NO 6 (as shown in FIG. 4A) shows a sequence of the gene in Populus and SEQ ID NO 7 (as shown in FIG. 4B) shows a sequence of the gene (allele A) in Salix. SEQ ID NO 28 (as shown in FIG. 4C) shows the Salix Xyld2 allele A in Salix polypeptide sequence.

[0103] The Xyld3 polynucleotide is shown in SEQ ID NO 8 and SEQ ID NO 9 and homologues thereof. SEQ ID NO 8 (as shown in FIG. 5A) shows a sequence of the gene in Populus and SEQ ID NO 9 (as shown in FIG. 5B) shows a sequence of the gene (allele A) in Salix. SEQ ID NO 29 (as shown in FIG. 5C) shows the Salix Xyld3 allele A polypeptide sequence.

[0104] The Xyld4 polynucleotide is shown in SEQ ID NO 10, SEQ ID NO 11 and SEQ ID NO 12. SEQ ID NO 10 (as shown in FIG. 6A) shows a sequence of the gene in Populus. SEQ ID NO 11 (as shown in FIG. 6B) shows a sequence of the gene (allele A) in Salix. SEQ ID NO 12 (as shown in FIG. 6C) shows a sequence of the gene (allele C) in Salix. SEQ ID NO 30 (as shown in FIG. 6D) shows the Salix Xyld4 allele A polypeptide sequence. SEQ ID NO 31 (as shown in FIG. 6E) shows the Salix Xyld4 allele C polypeptide sequence.

[0105] The Xyld5 polynucleotide is shown in SEQ ID NO 13. SEQ ID NO 13 (as shown in FIG. 7) shows a sequence of the gene in Populus.

[0106] The Xyld6 polynucleotide is shown in SEQ ID NO 14, SEQ ID NO 15 and SEQ ID NO 16. SEQ ID NO 14 (as shown in FIG. 8A) shows a sequence of the gene in Populus. SEQ ID NO 15 (as shown in FIG. 8B) shows a sequence of the gene (allele A) in Salix. SEQ ID NO 16 (as shown in FIG. 8C) shows a sequence of the gene (allele C) in Salix. SEQ ID NO 32 (as shown in FIG. 8D) shows the Salix Xyld6 allele A polypeptide sequence. SEQ ID NO 33 (as shown in FIG. 8E) shows the Salix Xyld6 allele C polypeptide sequence.

[0107] The Xyld7 polynucleotide is shown in SEQ ID NO 3, SEQ ID NO 2 and SEQ ID NO 1. SEQ ID NO 3 (as shown in FIG. 9A) shows a sequence of the gene in Populus. SEQ ID NO 2 (as shown in FIG. 9B) shows a sequence of the gene (allele A) in Salix. SEQ ID NO 1 (as shown in FIG. 9C) shows a sequence of the gene (allele C) in Salix. An alignment of Xyld7 allele A (SEQ ID NO 2) sequence with the Xyld7 allele C sequence (SEQ ID NO 1) (as shown in the alignment of FIG. 9D) indicates Xyld7 allele A has an insertion region with extra nucleotides that are not present in Xyld7 allele C sequence SEQ ID NO 1. SEQ ID NO 26 (as shown in FIG. 9E) shows the Salix Xyld7 allele C polypeptide sequence.

[0108] The Xyld8 polynucleotide is shown in SEQ ID NO 17, SEQ ID NO 18 and SEQ ID NO 19. SEQ ID NO 17 (as shown in FIG. 10A) shows a sequence of the gene in Populus. SEQ ID NO 18 (as shown in FIG. 10B) shows a sequence of the gene (allele A) in Salix. SEQ ID NO 19 (as shown in FIG. 10C) shows a sequence of the gene (allele C) in Salix. SEQ ID NO 34 (as shown in FIG. 10D) shows the Salix Xyld8 allele A polypeptide sequence. SEQ ID NO 35 (as shown in FIG. 10E) shows the Salix Xyld8 allele C polypeptide sequence.

[0109] The Xyld9 polynucleotide is shown in SEQ ID NO 20, SEQ ID NO 21 and SEQ ID NO 22. SEQ ID NO 20 (as shown in FIG. 11A) shows a sequence of the gene in Populus. SEQ ID NO 21 (as shown in FIG. 11B) shows a sequence of the gene (allele A) in Salix. SEQ ID NO 22 (as shown in FIG. 11C) shows a sequence of the gene (allele C) in Salix. SEQ ID NO 36 (as shown in FIG. 11D) shows the Salix Xyld9 allele A polypeptide sequence. SEQ ID NO 37 (as shown in FIG. 11E) shows the Salix Xyld9 allele C polypeptide sequence.

[0110] The Xyld10 polynucleotide is shown in SEQ ID NO 23, SEQ ID NO 24 and SEQ ID NO 25. SEQ ID NO 23 (as shown in FIG. 12A) shows a sequence of the gene in Populus. SEQ ID NO 24 (as shown in FIG. 12B) shows a sequence of the gene (allele A) in Salix. SEQ ID NO 25 (as shown in FIG. 12C) shows a sequence of the gene (allele C) in Salix. SEQ ID NO 38 (as shown in FIG. 12D) shows the Salix Xyld10 allele A polypeptide sequence. SEQ ID NO 39 (as shown in FIG. 12E) shows the Salix Xyld10 allele C polypeptide sequence.

[0111] The importance of Xyld1, Xyld2, Xyld3, Xyld4, Xyld5, Xyld6, Xyld7, Xyld8, Xyld9 and Xyld10 in genetic improvement in crop plants was established following the identification of a QTL region in Salix associated with improved harvestable biomass yield. The corresponding QTL region in Populus is shown in FIG. 1. A comparison of this QTL region with information from the Populus trichocarpa genome database (http://genome.jgi-psf.org/Poptr1_{—}1/Poptr1_{—}1.home.html) indicated that the QTL region comprises Xyld1, Xyld2, Xyld3, Xyld4, Xyld5, Xyld6, Xyld7, Xyld8, Xyld9 and Xyld10.

[0112] The information provided on Xyld1, Xyld2, Xyld3, Xyld4, Xyld5, Xyld6, Xyld7, Xyld8, Xyld9 and Xyld10 provides a route to exploitation in crops, other cultivated plants or model plants, not directly related to Populus or Salix as the information disclosed herein enables homologous genes to Xyld1, Xyld2, Xyld3, Xyld4, Xyld5, Xyld6, Xyld7, Xyld8, Xyld9 and Xyld10 to be identified.

[0113] Details of Xyld1, Xyld2, Xyld3, Xyld4, Xyld5, Xyld6, Xyld7, Xyld8, Xyld9 and Xyld10 are detailed below:

### 1. Xyld1

[0114] Xyld1 shows best homology in Arabidopsis thaliana with Locus AT3G12740, or ALIS1 (ALA-Interacting Subunit). ALIS1 is a member of a family of phospholipid transporters (ALIS1-ALIS5) which are homologs of the Cdc50p/Lem3p family in yeast that are essential for the trafficking of yeast P4-ATPases. The Arabidopsis ALIS proteins are 27-30% identical to yeast Cdc50p and similarity ranges from 48-53%. In yeast ALIS1 shows strong affinity to ALA3. In Arabidopsis, ALA3 has been shown to be important for trans-Golgi proliferation of slime vesicles containing polysaccharides and enzymes for secretion. In yeast, ALA3 function requires interaction with the ALIS1. In Arabidopsis plants, ALIS1, like ALA3, is localised to membranes of Golgi-like structures and is expressed in root peripheral columella cells. It has been proposed that the ALIS1 protein is a β-sub-unit of ALA3 in Arabidopsis and that this protein is important part of the Golgi machinery in plants required for secretory processes during development.

### Relevant Publications

[0115] Poulsen L R, López-Marqués R L, McDowell S C, Okkeri J, Licht D, Schulz A, Pomorski T, Harper J F, Palmgren M G. 2008 The Arabidopsis P4-ATPase ALA3 localizes to the golgi and requires a beta-subunit to function in lipid translocation and secretory vesicle formation. Plant Cell. 3:658-76.

[0116] Bosco C D, Lezhneva L, Biehl A, Leister D, Strotmann H, Wanner G, Meurer J. 2004 Inactivation of the chloroplast ATP synthase gamma subunit results in high non-photochemical fluorescence quenching and altered nuclear gene expression in Arabidopsis thaliana. J Biol Chem. 279(2):1060-9.

### 2. Xyld 2

[0117] Xyld 2 shows strongest homology to Arabidopsis thaliana gene ALDH5F1 (Locus AT1G79440; previous nomenclature SSADH; EC 1.2.1.24) which is a member of the aldehyde dehydrogenases (ALDHs) protein superfamily of NAD(P)C-dependent enzymes that oxidize a wide range of endogenous and exogenous aliphatic and aromatic aldehydes. The Arabidopsis genome contains 14 unique ALDH sequences encoding members of nine ALDH families, including eight known families and one novel family (ALDH22) that is currently known only in plants. Of these, there is one succinic semialdehyde dehydrogenase gene, ALDH5F1, which encodes a protein of 528 amino acids. ALDH5F1 is the only confirmed identified member of the succinic semialdehyde family in plants. The Arabidopsis protein is localized to mitochondria and a kinetic analysis showed that the recombinant enzyme was specific for succinic semialdehyde and regulated by adenine nucleotides. T-DNA knockout mutants of ALDH5F1 result in dwarfed plants with necrotic lesions and are sensitive to both ultraviolet-B light and heat stress. Plants with ssadh mutations accumulate elevated levels of H₂O₂, suggesting a role for this gene in stress regulation detoxification pathway plant, providing defense against environmental stress by preventing the accumulation of reactive oxygen species.

### Relevant Publications

[0118] Hueser, A F, UI L. 2008 Analysis of GABA-shunt metabolites in Arabidopsis thaliana 19th International Conference on Arabidopsis Research

[0119] Ludewig F, Hüser A, Fromm H, Beauclair L, Bouché N. 2008 Mutants of GABA transaminase (POP2) suppress the severe phenotype of succinic semialdehyde dehydrogenase (ssadh) mutants in Arabidopsis. PLoS ONE 3(10):e3383

[0120] Zybailov B, Rutschow H, Friso G, Rudella A, Emanuelsson O, Sun Q, van Wijk K J. 2008 Sorting signals, N-terminal modifications and abundance of the chloroplast proteome. PLoS ONE 3(4):e1994

[0121] Fait A, Yellin A, Fromm H. 2005 GABA shunt deficiencies and accumulation of reactive oxygen intermediates: insight from Arabidopsis mutants. FEBS Lett. 579(2):415-20

[0122] Kirch H H, Bartels D, Wei Y, Schnable P S, Wood A J. 2004 The ALDH gene superfamily of Arabidopsis. Trends Plant Sci. 9(8):371-7

[0123] Breitkreuz K E, Allan W L, Van Cauwenberghe O R, Jakobs C, Talibi D, Andre B, Shelp B J. 2003 A novel gamma-hydroxybutyrate dehydrogenase: identification and expression of an Arabidopsis cDNA and potential role under oxygen deficiency. J Biol Chem. 278(42):41552-6

### 3. Xyld3

[0124] Xyld3 shows strongest homology with Arabidopsis thaliana ALTERED PHLOEM DEVELOPMENT (APL) gene (Locus AT1G79430), which encodes a MYB coiled-coil-type transcription factor that is required for phloem identity in Arabidopsis. APL has been proposed to have a dual role both in promoting phloem differentiation and in repressing xylem differentiation during vascular development.

### Relevant Publications

[0125] Truernit E, Bauby H, Dubreucq B, Grandjean O, Runions J, Barthelemy J, Palauqui J C. 2008 High-resolution whole-mount imaging of three-dimensional tissue organization and gene expression enables the study of Phloem development and structure in Arabidopsis. Plant Cell. 20(6):1494-503

[0126] Lehesranta S, Lindgren O, Taehtiharju S, Carlsbecker A, Helariutta Y 2008 The role of APL as a transcriptional regulator in specifying vascular identity 19th International Conference on Arabidopsis Research

[0127] Carlsbecker A, Lindgren O, Bonke M, Thitamadee S, Tähtiharju S, Helariutta Y 2004 Genetic analysis of procambial development in the Arabidopsis root 15th International Conference on Arabidopsis Research

[0128] Bonke M, Hauser M-T, Helariutta Y 2002 The APL locus is required for phloem development in Arabidopsis roots. 13th International Conference on Arabidopsis Research

### 4. Xyld4

[0129] Xyld4 show strongest homology in Arabidopsis thaliana to Locus AT1G79420. Function not yet described.

### 5. Xyld5

[0130] Xyld5 shows strongest homology with AtOCT2 in Arabidopsis thaliana (Locus AT1G79360). ATOCT2 is one of six Arabidopsis organic cation/carnitine transporter (OCT)-like proteins, named AtOCT1-AtOCT6 (loci At1g73220, At1g79360, At1g16390, At3g20660, At1g79410 and At1g16370, respectively) that have been identified. These proteins cluster in a small subfamily within the ‘organic solute cotransporters’ included in the large sugar transporter family of the major facilitator superfamily (MFS). AtOCT1 shares features of organic cation/camitine transporters (OCTs). In animals, mammalian plasma membrane OCTs are involved in homeostasis and distribution of various small endogenous amines (e.g. camitine, choline) and detoxification of xenobiotics such as nicotine. AtOCT1 is able to transport carnitine in yeast and is likely to be involved in the transport of camitine or related molecules across the plasma membrane in plants.

[0131] The orthologous gene sequence has not yet been identified in willow.

### Related Publication

[0132] Tohge T, Nishiyama Y, Hirai M Y, Yano M, Nakajima J, Awazuhara M, Inoue E, Takahashi H, Goodenowe D B, Kitayama M, Noji M, Yamazaki M, Saito K. 2005 Functional genomics by integrated analysis of metabolome and transcriptome of Arabidopsis plants over-expressing an MYB transcription factor. Plant J. 42(2):218-35

### 6. Xyld6

[0133] Xyld6 shows best fit with ATOCT3 Arabidopsis ORGANIC CATION/CARNITINE TRANSPORTER2). ATOCT3 is one of six Arabidopsis organic cation/carnitine transporter (OCT)-like proteins, named AtOCT1-AtOCT6 (loci At1g73220, At1g79360, At1g16390, At3g20660, At1g79410 and At1g16370, respectively) referred to above. These proteins cluster in a small subfamily within the ‘organic solute cotransporters’ included in the large sugar transporter family of the major facilitator superfamily (MFS).

### Relevant Publications

[0134] Lelandais-Brière C, Jovanovic M, Torres G A, Penin Y, Lemoine R, Corre-Menguy F, Hartmann C. 2007 Disruption of AtOCT1, an organic cation transporter gene, affects root development and carnitine-related responses in Arabidopsis. Plant J. 51(2):154-64

[0135] Price J, Laxmi A, St Martin S K, Jang J C. 2004 Global transcription profiling reveals multiple sugar signal transduction mechanisms in Arabidopsis. Plant Cell.16(8):2128-50

### 7. Xyld7

[0136] Xyld7 shows homology with members of the R2R3-type MYB gene family in Arabidopsis. Although no functional data are available for most of the 125 R2R3-type AtMYB genes, a number of functions have been assigned concerning many aspects of plant secondary metabolism, as well as the identity and fate of plant cells. This includes regulation of phenylpropanoid metabolism, control of development and determination of cell fate and identity, plant responses to environmental factors and mediating hormone actions.

### Relevant Publications

[0137] Stracke R, Werber M, Weisshaar B. 2001 The R2R3-MYB gene family in Arabidopsis thaliana. Curr Opin Plant Biol. 4(5):447-56

[0138] Riechmann J L, Heard J, Martin G, Reuber L, Jiang C, Keddie J, Adam L, Pineda O, Ratcliffe O J, Samaha R R, Creelman R, Pilgrim M, Broun P, Zhang J Z, Ghandehari D, Sherman B K, Yu G. 2000 Arabidopsis transcription factors: genome-wide comparative analysis among eukaryotes. Science. 290(5499):2105-10

### 8. Xyld8

[0139] Xyld8 shows best fit with ANAC028, Arabidopsis NAC domain containing protein (Locus AT1G65910). NAC (NAM, ATAF, and CUC) is a plant-specific gene family. NAC family transcription factors are involved in maintaining organ or tissue boundaries regulating the transition from growth by cell division to growth by cell expansion. Most NAC proteins contain a highly conserved N-terminal DNA-binding domain, a nuclear localization signal sequence, and a variable C-terminal domain. 75 and 105 NAC genes were predicted in the Oryza sativa and Arabidopsis genomes, respectively. The functions of only some of these have been described. The first reported NAC genes were NAM from petunia and CUC2 from Arabidopsis that participate in shoot apical meristem development. CUC1, CUC2 and nam are expressed at the boundaries between cotyledonary primordial and between floral organs and are specifically involved in shoot apical meristem formation and separation of cotyledons and floral organs. Other development-related NAC genes have been suggested with roles in controlling cell expansion of specific flower organs e.g. NAP or auxindependent formation of the lateral root system e.g. NAC1. Some of NAC genes, such as ATAF1 and ATAF2 genes from Arabidopsis and the StNAC gene from potato, are induced by pathogen attack and wounding. More recently, a few NAC genes, such as AtNAC072 (RD26), AtNAC019, AtNAC055 from Arabidopsis, and BnNAC from Brassica (31), were found to be involved in responses to environmental stress. Seven members of NAC family At2g18060, At4g36160, At5g66300, At1g12260, At1g62700, At5g62380, and At1g71930 have been designated as VASCULAR-RELATED NAC-DOMAIN PROTEIN 1 (VND1 to VND7). Members of these could induce transdifferentiation of various cells into metaxylem- and protoxylem-like vessel elements, respectively, in Arabidopsis and poplar. Similarly ANAC012 and ANAC073 also appear to have a role in xylem development and secondary wall thickening in Arabidopis.

### Relevant Publications

[0140] Ooka H, Satoh K, Doi K, Nagata T, Otomo Y, Murakami K, Matsubara K, Osato N, Kawai J, Carninci P, Hayashizaki Y, Suzuki K, Kojima K, Takahara Y, Yamamoto K, Kikuchi S. 2003 Comprehensive analysis of NAC family genes in Oryza sativa and Arabidopsis thaliana. DNA Res. 10(6):239-47

[0141] Riechmann J L, Heard J, Martin G, Reuber L, Jiang C, Keddie J, Adam L, Pineda O, Ratcliffe O J, Samaha R R, Creelman R, Pilgrim M, Broun P, Zhang J Z, Ghandehari D, Sherman B K, Yu G. 2000 Arabidopsis transcription factors: genome-wide comparative analysis among eukaryotes. Science 290(5499):2105-10

### 9. Xyld9

[0142] Xyld9 show strongest homology in Arabidopsis thaliana to Locus AT1G79390. The function of this expressed protein has not yet been described

### 10. Xyld10

[0143] Xyld10 shows homology to the RGLG2 (RING DOMAIN LIGASE2) locus of Arabidopsis thaliana (Locus AT1G79380). In functional terms, the RING domain can basically be considered a protein-interaction domain. RING-finger proteins have been implicated in a range of diverse biological processes and biochemical activities, from transcriptional and translational regulation to targeted protein degradation.

### Relevant Publications

[0144] Kosarev P, Mayer K F, Hardtke C S. 2002 Evaluation and classification of RING-finger domains encoded by the Arabidopsis genome. Genome Biol. 3(4):RESEARCH 0016.1

[0145] Further homologous genes to Xyld1, Gene Xyld2, Gene Xyld3, Gene Xyld4, Gene Xyld6, Gene Xyld7, Gene Xyld8, Gene Xyld9 and Gene Xyld10 can be identified, for example, through in silico sequence similarity searches for crops/cultivated or model plants for which such sequence resources exist. Where such resources are lacking, standard molecular biology methods can be employed to clone homologous genes. As examples, degenerate primers can designed to amino acid sequences and used in PCR to amplify and clone target genes, or alternatively, sequences can be used in hybridisation approaches if sufficient similarity is expected.

[0146] Once homologous genes are identified by any such approach, and the crop/plant specific sequence is determined, polymorphisms within a given gene can identified through sequencing or restriction analysis, as examples.

1. Direct application in genetic improvement.

[0147] The gene defined here facilitates direct use for selection of high yielding plants in crop breeding programmes. Several laboratories have collections of polymorphic markers for general use in mapping studies or for assessing genetic diversity. Now that the gene has been identified here and a sequence provided, if markers linked to the gene described here are available in these laboratories they could be directly employed in selection programmes for improving yield.

[0148] The efficiency of the use of QTL-associated marker in marker-assisted selection strategies will be dependent on the degree of genetic linkage that exists between the marker to be used and the causal polymorphism that underlies the QTL. To maximise the efficiency of marker-assisted selections based on a QTL, such as that described here, markers that are tightly linked to the region would be required to minimise the likelihood that linkage between the marker and the causal polymorphism will breakdown through recombination. The information described here provides a route to efficient achievement of the identification of markers whose linkage to the causal polymorphism will not be broken easily by recombination. Although anonymous markers such as Amplified Fragment Length Polymorphism (AFLP) and Random Amplified Polymorphism (RAPD) classes for example, could be screened in large numbers to identify those that may fall into regions of the genome linked to the QTL by chance, more efficient methods based on the sequence information provided here can be used in more direct approaches.

[0149] Using knowledge of the underlying sequence information that is publicly available in Populus (http://genome.jgi-psf.org/Poptr1_{—}1/Poptr1_{—}1.home.html) or that which is provided here for willow, specific markers can be developed that are targeted directly at this region or to a region that is closely linked in genetic terms. Markers of this class could include, as examples, microsatellite markers, Restriction Length Fragment Length Polymoprhisms (RFLP), Cleaved Amplified Polymorphisms (CAPS), Single Nucleotide Polymorphisms (SNPS) and INSertion/DELetion (INDELs). For microsatellite markers, primer pairs that amplify potentially highly polymorphic simple sequence repeat units could be designed from Salix or Populus sequence in this region. These could be specific to either genus or could be directly transferable from one genus to the other, if nucleotide sequence is sufficiently conserved at the priming sites. This is often true if priming sites are selected within coding regions (Hanley, S. J., Mallott, M. D. & Karp A. (2006) Tree Genetics and Genomes, 3, 35-48) (Hanley et al, 2006). Microsatellite primer sets would then be tested for their ability to detect polymoprhisms in the germplasm under study, and those that distinguish between alleles could be used in marker-assisted selections. Similarly, for the development of other markers types (SNP, CAPS, INDEL) sequence information for the QTL region could be used to design primer sets to generate amplicons that could then be examined for polymorphisms in the germplasm under study, either from sequencing or restriction digestion analysis.

2. Application in transgenic genetic improvement strategies.

[0150] The sequences supplied provide a route to crop improvement through genetic manipulation via transgenic approaches. The sequences provided could be used directly to generate constructs for testing in transformation experiments. Such experiments may involve overexpression, gene-silencing or introduction of a beneficial allele into any recipient genotype. Such experiments may utilise the Salix or Populus sequences provided here or be based on homologous genes derived from any plant of interest.

[0151] This disclosure relates to representative markers, and alleles thereof, that correspond to and identify a locus that is associated with harvestable yield.

[0152] The methods, markers, and alleles of the present invention provide a simple, inexpensive and reliable means of identifying the haplotype associated with the harvestable biomass yield locus. By identifying the chromosome haplotype in this region, it is possible to predict whether the harvestable biomass yield associated QTL contributes to small or large yield of plant.

[0153] Thus, one aspect of this disclosure concerns markers (and alleles thereof) genetically linked to a polynucleotide sequence having at least 50, 55, 60, 65, 70, 75, 80, 85, 90, 95, 97, 98, 99 or 100% identity to SEQ ID NO 1, 2, 3, 4, 5, 6, 7, 8, 9, 10, 11, 12, 13, 14, 15, 16, 17, 18, 19, 20, 21, 22, 23, 24 or 25, which is associated with a harvestable biomass yield associated QTL that provides a contribution to harvestable biomass yield in willow.

[0154] Another aspect of this disclosure concerns markers (and alleles thereof) genetically linked to a polynucleotide sequence having at least 50, 55, 60, 65, 70, 75, 80, 85, 90, 95, 97, 98, 99 or 100% identity to a nucleotide sequence encoding the polypeptide of SEQ ID NO 26, 27, 28, 29, 30, 31, 32, 33, 34, 35, 36, 37, 38 or 39, which is associated with a harvestable biomass yield associated QTL that provides a contribution to harvestable biomass yield in willow.

[0155] Kits including probes that detect the markers described herein are also a feature of this disclosure.

[0156] Another aspect of this disclosure concerns a method for predicting harvestable biomass yield in a crop plant. The method can include genotyping a sample obtained from a subject crop plant for one or more markers genetically linked to a polynucleotide sequence having at least 50, 55, 60, 65, 70, 75, 80, 85, 90, 95, 97, 98, 99 or 100% identity to SEQ ID NO 1, 2, 3, 4, 5, 6, 7, 8, 9, 10, 11, 12, 13, 14, 15, 16, 17, 18, 19, 20, 21, 22, 23, 24 or 25. The markers are chosen to individually or collectively identify a haplotype associated with harvestable biomass yield. The haplotype is correlated with harvestable biomass yield providing a prediction of the harvestable biomass yield of the subject plant.

[0157] A further aspect of this disclosure concerns a method for predicting harvestable biomass yield in a crop plant. The method can include genotyping a sample obtained from a subject crop plant for one or more markers genetically linked to a polynucleotide sequence having at least 50, 55, 60, 65, 70, 75, 80, 85, 90, 95, 97, 98, 99 or 100% identity to a nucleotide sequence encoding the polypeptide of SEQ ID NO 26, 27, 28, 29, 30, 31, 32, 33, 34, 35, 36, 37, 38 or 39. The markers are chosen to individually or collectively identify a haplotype associated with harvestable biomass yield. The haplotype is correlated with harvestable biomass yield providing a prediction of the harvestable biomass yield of the subject plant.

[0158] In certain embodiments, the haplotype is correlated with harvestable biomass yield by comparing the haplotype to an index of average harvestable biomass yield by plant variety.

### Definitions

[0159] The poplar and willow chromosomes are referred to as ‘linkage groups’. This is because there are more sequence contigs than chromosomes in the poplar assembly.

[0160] An “allele” is understood within the scope of the invention to refer to a given form of a gene, or of any kind of identifiable genetic element such as a marker, that occupies a specific position or locus on a chromosome. Variant forms of genes occurring at the same locus are said to be alleles of one another. In a diploid cell or organism, the two alleles of a given gene (or marker) typically occupy corresponding loci on a pair of homologous chromosomes.

[0161] An allele associated with a quantitative trait may comprise a single gene or multiple genes or even a gene encoding a genetic factor contributing to the phenotype represented by said QTL.

[0162] The term “breeding”, and grammatical variants thereof, refer to any process that generates a progeny individual. Breedings can be sexual or asexual, or any combination thereof. Exemplary non-limiting types of breedings include crossings, selfings, doubled haploid derivative generation, and combinations thereof.

[0163] By “exogenous gene/polynucleotide” it is meant that the gene/polynucleotide is transformed into the unmodified plant from an external source. The exogenous nucleotide may, for example, be derived from a genomic DNA or cDNA sequence. Typically the exogenous gene is derived from a different source and has a sequence different to the endogenous gene. Alternatively, introduction of an exogenous gene having a sequence identical to the endogenous gene may be used to increase the number of copies of the endogenous gene sequence present in the plant.

[0164] The term “Homozygous” refers to like alleles at one or more corresponding loci on homologous chromosomes.

[0165] The term “Heterozygous refers to unlike alleles at one or more corresponding loci on homologous chromosomes.

[0166] The term “Gene” refers to a unit of DNA which performs one function. Usually, this is equated with the production of one RNA or one protein. A gene may contain coding regions, introns, untranslated regions and control regions.

[0167] As used herein, the phrase “genetic marker” refers to a feature of an individual's genome (e.g., a nucleotide or a polynucleotide sequence that is present in an individual's genome) that is associated with one or more loci of interest. Typically, a genetic marker is polymorphic and the variant forms (or llel. Genetic markers include, for example, single nucleotide polymorphisms (SNPs), indels (i.e., insertions/deletions), simple sequence repeats (SSRs), restriction fragment length polymorphisms (RFLPs), random amplified polymorphic DNAs (RAPDs), cleaved amplified polymorphic sequence (CAPS) markers, Diversity Arrays Technology (DArT) markers, and amplified fragment length polymorphisms (AFLPs), Microsatellites or Simple sequence repeat (SSRs) among many other examples.

[0168] Genetic markers can, for example, be used to locate genetic loci containing alleles that contribute to variability in expression of phenotypic traits on a chromosome.

[0169] A genetic marker can be physically located in a position on a chromosome that is within or outside of to the genetic locus with which it is associated (i.e., is intragenic or extragenic, respectively). Stated another way, whereas genetic markers are typically employed when the location on a chromosome of the gene that corresponds to the locus of interest has not been identified and there is a non-zero rate of recombination between the genetic marker and the locus of interest, the presently disclosed subject matter can also employ genetic markers that are physically within the boundaries of a genetic locus (e.g., inside a genomic sequence that corresponds to a gene such as, but not limited to a polymorphism within an intron or an exon of a gene). In some embodiments of the presently disclosed subject matter, the one or more genetic markers comprise between one and ten markers, and in some embodiments the one or more genetic markers comprise more than ten genetic markers.

[0170] The term “genotype” refers to the set of alleles present in a subject at one or more loci under investigation. At any one autosomal locus a geneotype will be either homozygous (with two identical alleles) or heterozygous (with two different alleles).

[0171] The term “haplotype” refers to the set of alleles an individual inherited from one parent. A diploid individual thus has two haplotypes. The term “haplotype” can be used in a more limited sense to refer to physically linked and/or unlinked genetic markers (e.g., sequence polymorphisms) associated with a phenotypic trait. The phrase “haplotype block” (sometimes also referred to in the literature simply as a haplotype) refers to a group of two or more genetic markers that are physically linked on a single chromosome (or a portion thereof). Typically, each block has a few common haplotypes, and a subset of the genetic markers (i.e., a “haplotype tag”) can be chosen that uniquely identifies each of these haplotypes.

[0172] As used herein, the terms “hybrid”, “hybrid plant,” and “hybrid progeny” refers to an individual produced from genetically different parents (e.g., a genetically heterozygous or mostly heterozygous individual).

[0173] If two individuals possess the same allele at a particular locus, the alleles are termed “identical by descent” if the alleles were inherited from one common ancestor (i.e., the alleles are copies of the same parental allele). The alternative is that the alleles are “identical by state” (i.e., the alleles appear the same but are derived from two different copies of the allele). Identity by descent information is useful for linkage studies; both identity by descent and identity by state information can be used in association studies such as those described herein, although identity by descent information can be particularly useful.

[0174] The term “linkage”/“genetic linkage”, and grammatical variants thereof, refers to the association of two or more (and/or traits) at positions on the same chromosome, preferably such that recombination between the two loci is reduced to a proportion significantly less than 50%. The term linkage can also be used in reference to the association between one or more loci and a trait if an allele (or alleles) and the trait, or absence thereof, are observed together in significantly greater than 50% of occurrences. A linkage group is a set of loci, in which all members are linked either directly or indirectly to all other members of the set.

[0175] “linkage disequilibrium” (also called “allelic association”) refers to a phenomenon wherein particular alleles at two or more loci tend to remain together in linkage groups when segregating from parents to offspring with a greater frequency than expected from their individual frequencies in a given population. For example, a genetic marker allele and a QTL allele can show linkage disequilibrium when they occur together with frequencies greater than those predicted from the individual allele frequencies. Linkage disequilibrium can occur for several reasons including, but not limited to the alleles being in close proximity on a chromosome

[0176] “Locus” refers to a region on a chromosome, which comprises a gene or a genetic marker or the like.

[0177] As used herein, the phrase “nucleic acid” refers to any physical string of monomer units that can be corresponded to a string of nucleotides, including a polymer of nucleotides (e.g., a typical DNA, cDNA or RNA polymer), modified oligonucleotides (e.g., oligonucleotides comprising bases that are not typical to biological RNA or DNA, such as 2′-O-methylated oligonucleotides), and the like. In some embodiments, a nucleic acid can be single-stranded, double-stranded, multi-stranded, or combinations thereof. Unless otherwise indicated, a particular nucleic acid sequence of the presently disclosed subject matter optionally comprises or encodes complementary sequences, in addition to any sequence explicitly indicated.

[0178] The term “protein” includes single-chain polypeptide molecules as well as multiple-polypeptide complexes where individual constituent polypeptides are linked by covalent or non-covalent means.

[0179] The phrase “phenotypic trait” refers to the appearance or other detectable characteristic of an individual, resulting from the interaction of its genome with the environment.

[0180] “The term Microsatellite or SSRs (Simple sequence repeats) (Marker)” refers to a type of genetic marker that consists of numerous repeats of short sequences of DNA bases, which are found at loci throughout the plant's DNA and have a likelihood of being highly polymorphic.

[0181] “Polymorphism” refers to the presence in a population of two or more different forms of a gene, genetic marker, or inherited trait.

[0182] The term “quantitative trait locus” (QTL) refers to an association between a genetic marker and a chromosomal region and/or gene that affects the phenotype of a trait of interest. Typically, this is determined statistically; e.g., based on one or more methods published in the literature. A QTL can be a chromosomal region and/or a genetic locus with at least two alleles that differentially affect the expression of a phenotypic trait (either a quantitative trait or a qualitative trait).

[0183] “Sequence Homology or Sequence identity” is used herein interchangeably. The terms “identical” or percent “identity” in the context of two or more nucleic acid or protein sequences, refer to two or more sequences or subsequences that are the same or have a specified percentage of amino acid residues or nucleotides that are the same, when compared and aligned for maximum correspondence, as measured using one of the following sequence comparison algorithms or by visual inspection. If two sequences which are to be compared with each other differ in length, sequence identity preferably relates to the percentage of the nucleotide residues of the shorter sequence which are identical with the nucleotide residues of the longer sequence. Sequence identity can be determined conventionally with the use of computer programs such as the Bestfit program (Wisconsin Sequence Analysis Package, Version 8 for Unix, Genetics Computer Group, University Research Park, 575 Science Drive Madison, Wis. 53711). Bestfit utilizes the local homology algorithm of Smith and Waterman, Advances in Applied Mathematics 2 (1981), 482-489, in order to find the segment having the highest sequence identity between two sequences. When using Bestfit or another sequence alignment program to determine whether a particular sequence has for instance 95% identity with a reference sequence of the present invention, the parameters are preferably so adjusted that the percentage of identity is calculated over the entire length of the reference sequence and that homology gaps of up to 5% of the total number of the nucleotides in the reference sequence are permitted. When using Bestfit, the so-called optional parameters are preferably left at their preset (“default”) values. The deviations appearing in the comparison between a given sequence and the above-described sequences of the invention may be caused for instance by addition, deletion, substitution, insertion or recombination. Such a sequence comparison can preferably also be carried out with the program “fasta20u66” (version 2.0u66, September 1998 by William R. Pearson and the University of Virginia; see also W. R. Pearson (1990), Methods in Enzymology 183, 63-98, appended examples and http://workbench.sdsc.edu/). For this purpose, the “default” parameter settings may be used.

[0184] Preferably, reference to a sequence which has a percent identity to any one of SEQ ID NOs: 1-43 as detailed herein refers to a sequence which has the stated percent identity over the entire length of the SEQ ID NO referred to.

[0185] Another indication that two nucleic acid sequences are substantially identical is that the two molecules hybridize to each other under stringent conditions.

[0186] In general, unless otherwise specified, when referring to a “plant” it is intended to cover a plant at any stage of development, including sing cells and seeds. Thus, in particular embodiments, the present invention provides a plant cell.

[0187] A “plant cell” is a structural and physiological unit of a plant, comprising a protoplast and a cell wall. The plant cell may be in form of an isolated single cell or a cultured cell, or as a part of higher organized unit such as, for example, plant tissue, a plant organ, or a whole plant.

[0188] “Plant cell culture” means cultures of plant units such as, for example, protoplasts, cell culture cells, cells in plant tissues, pollen, pollen tubes, ovules, embryo sacs, zygotes and embryos at various stages of development.

[0189] “Plant material” refers to leaves, stems, roots, flowers or flower parts, fruits, pollen, egg cells, zygotes, seeds, cuttings, cell or tissue cultures, or any other part or product of a plant.

[0190] A “plant organ” is a distinct and visibly structured and differentiated part of a plant such as a root, stem, leaf, flower bud, or embryo.

[0191] “Plant tissue” as used herein means a group of plant cells organized into a structural and functional unit. Any tissue of a plant in planta or in culture is included. This term includes, but is not limited to, whole plants, plant organs, plant seeds, tissue culture and any groups of plant cells organized into structural and/or functional units. The use of this term in conjunction with, or in the absence of, any specific type of plant tissue as listed above or otherwise embraced by this definition is not intended to be exclusive of any other type of plant tissue.

[0192] “Harvestable biomass yield” is calculated according to the plants parts that constitute relevant harvestable product. In one embodiment, a harvestable biomass yield corresponds to the total of the above ground biomass being the harvestable product. Preferred examples, where the harvestable product of the crop may be the above ground biomass are trees such as, for example (but not limited to), Salex or Popular. In another embodiment, a harvestable biomass yield corresponds to only one part of the plant being the harvestable product. Preferred examples, where the harvestable product of the crop may be a part of the plant are parts of food crops such as, for example (but not limited to), the kernel in maize or the grain in rice.

[0193] The genomic DNA can be assayed to determine which markers are present using any method known in the art. For example, single-strand conformation polymorphism (SSCP) analysis, base excision sequence scanning (BESS), restriction fragment length polymorphism (RFLP) analysis, heteroduplex analysis, denaturing gradient gel electrophoresis (DGGE), temperature gradient electrophoresis, allelic polymerase chain reaction (PCR), ligase chain reaction direct sequencing, mini sequencing, nucleic acid hybridization, or micro-array-type detection can be used to identify the polymorphisms present in the sample.

[0194] The methods described herein include genotyping a sample of genetic material obtained from a subject plant for one or more markers to determine the allele present at the marker locus.

### Detection of Alleles

[0195] The nucleic acids obtained from the sample can be genotyped to identify the particular allele present for a marker locus. A sample of sufficient quantity to permit direct detection of marker alleles from the sample can be obtained from the plant.

[0196] Alternatively, a smaller sample is obtained from the subject and the nucleic acids are amplified prior to detection. Optionally, the nucleic acid sample is purified (or partially purified) prior to detection of the marker alleles. Any target nucleic that is informative for a chromosome haplotype in the interval corresponding to the sequence located between reference nucleotide position A and reference nucleotide position B can be detected. The target nucleic acid may correspond to a marker locus localized in this interval. Any method of detecting a nucleic acid molecule can be used such as hybridization and/or sequencing assays.

### Hybridization

[0197] Hybridization is the binding of complementary strands of DNA, DNA/RNA, or RNA. Hybridization can occur when primers or probes bind to target sequences such as target sequences within willow genomic DNA. Probes and primers that are useful generally include nucleic acid sequences that hybridize (for example under high stringency conditions) with at least 10, 12, 14, 16, 18, or 20 to the sequences provided. Physical methods of detecting hybridization or binding of complementary strands of nucleic acid molecules, include but are not limited to, such methods as DNase I or chemical footprinting, gel shift and affinity cleavage assays, Southern and Northern blotting, dot blotting and light absorption detection procedures. The binding between a nucleic acid primer or probe and its 26 target nucleic acid is frequently characterized by the temperature (Tm) at which 50% of the nucleic acid probe is melted from its target. A higher (Tm) means a stronger or more stable complex relative to a complex with a lower (Tm).

[0198] More generally, complementary nucleic acids form a stable duplex or triplex when the strands bind, (hybridize), to each other by forming Watson-Crick, Hoogsteen or reverse Hoogsteen base pairs. Stable binding occurs when an oligonucleotide molecule remains detectably bound to a target nucleic acid sequence under the required conditions.

[0199] Complementarity is the degree to which bases in one nucleic acid strand base pair with the bases in a second nucleic acid strand. Complementarity is conveniently described by percentage, that is, the proportion of nucleotides that form base pairs between two strands or within a specific region or domain of two strands.

[0200] For example, if 10 nucleotides of a 15-nucleotide oligonucleotide form base pairs with a targeted region of a DNA molecule, that oligonucleotide is said to have 66.67% complementarity to the region of DNA targeted.

[0201] ‘Sufficient complementarity’ means that a sufficient number of base pairs exist between an oligonucleotide molecule and a target nucleic acid sequence to achieve detectable binding. When expressed or measured by percentage of base pairs formed, the percentage complementarity that fulfills this goal can range from as little as about 50% complementarity to full (100%) complementary. In general, sufficient complementarity is at least about 50%, for example at least about 75% complementarity, at least about 90% complementarity, at least about 95% complementarity, at least about 98% complementarity, or even at least about 100% complementarity.

[0202] A thorough treatment of the qualitative and quantitative considerations involved in establishing binding conditions that allow one skilled in the art to design appropriate oligonucleotides for use under the desired conditions is provided by Beltz et al. Methods Enzymol 100:266-285, 1983, and by Sambrook et al. (ed.), 27 Molecular Cloning: A Laboratory Manual, 2nd ed., vol. 1-3, Cold Spring Harbor Laboratory Press, Cold Spring Harbor, N.Y., 1989.

[0203] Hybridization conditions resulting in particular degrees of stringency will vary depending upon the nature of the hybridization method and the composition and length of the hybridizing nucleic acid sequences. Generally, the temperature of hybridization and the ionic strength (such as the Na⁺ concentration) of the hybridization buffer will determine the stringency of hybridization. Calculations regarding hybridization conditions for attaining particular degrees of stringency are discussed in Sambrook et al., (1989) Molecular Cloning: a laboratory manual, second edition, Cold Spring Harbor Laboratory, Plainview, N.Y. (chapters 9 and I 1).

[0204] The following is an exemplary set of hybridization conditions and is not limiting.

[0205] Very High Stringency (Detects Sequences that Share at Least 90% Complementarity)

[0206] Hybridization: 5×SSC at 65° C. for 16 hours

[0207] Wash twice: 2×SSC at room temperature (RT) for 15 minutes each

[0208] Wash twice: 0.5×SSC at 65° C. for 20 minutes each

[0209] High Stringency (Detects Sequences that Share at Least 80% Complementarity)

[0210] Hybridization: 5×-6×SSC at 65° C.-70° C. for 16-20 hours

[0211] Wash twice: 2×SSC at RT for 5-20 minutes each

[0212] Wash twice: 1×SSC at 55° C.-70° C. for 30 minutes each

[0213] Low Stringency (Detects Sequences that Share at Least 50% Complementarity)

[0214] Hybridization: 6×SSC at RT to 55° C. for 16-20 hours

[0215] Wash at least twice: 2×-3×SSC at RT to 55° C. for 20-30 minutes each.

[0216] Methods for labeling nucleic acid molecules so they can be detected are well known. Examples of such labels include non-radiolabels and radiolabels. Non-radiolabels include, but are not limited to an enzyme, chemiluminescent compound, fluorescent compound (such as FITC, Cy3, and Cy5), metal complex, hapten, enzyme, colorimetric agent, a dye, or combinations thereof. Radiolabels include, but are not limited to, ¹²⁵I and ³⁵S. For example, radioactive and fluorescent labeling methods, as well as other methods known in the art, are suitable for use with the present disclosure. In one example, primers used to amplify the subject's nucleic acids are labeled (such as with biotin, a radiolabel, or a fluorophore). In another example, amplified target nucleic acid samples are end-labeled to form labeled 28 amplified material. For example, amplified nucleic acid molecules can be labeled by including labeled nucleotides in the amplification reactions.

[0217] Nucleic acid molecules associated corresponding to one or more marker loci can also be detected by hybridization procedures using a labeled nucleic acid probe, such as a probe that detects only one alternative allele at a marker locus. Most commonly, the target nucleic acid (or amplified target nucleic acid) is separated based on size or charge and transferred to a solid support. The solid support (such as membrane made of nylon or nitrocellulose) is contacted with a labeled nucleic acid probe, which hybridizes to it complementary target under suitable hybridization conditions to form a hybridization complex.

[0218] Hybridization conditions for a given combination of array and target material can be optimized routinely in an empirical manner close to the Tm of the expected duplexes, thereby maximizing the discriminating power of the method. For example, the hybridization conditions can be selected to permit discrimination between matched and mismatched oligonucleotides. Hybridization conditions can be chosen to correspond to those known to be suitable in standard procedures for hybridization to filters (and optionally for hybridization to arrays). In particular, temperature is controlled to substantially eliminate formation of duplexes between sequences other than an exactly complementary allele of the selected marker. A variety of known hybridization solvents can be employed, the choice being dependent on considerations known to one of skill in the art (see U.S. Pat. No. 5,981,185).

[0219] Once the target nucleic acid molecules have been hybridized with the labeled probes, the presence of the hybridization complex can be analyzed, for example by detecting the complexes.

[0220] Methods for detecting hybridized nucleic acid complexes are well known in the art. In one example, detection includes detecting one or more labels present on the oligonucleotides, the target (e.g., amplified) sequences, or both. Detection can include treating the hybridized complex with a buffer and/or a conjugating solution to effect conjugation or coupling of the hybridized complex with the detection label, and treating the conjugated, hybridized complex with a detection reagent. In one example, the conjugating solution includes streptavidin alkaline phosphatase, avidin alkaline phosphatase, or horseradish peroxidase. Specific, non-limiting examples of conjugating solutions include streptavidin alkaline phosphatase, avidin alkaline phosphatase, or horseradish peroxidase. The conjugated, hybridized complex can be treated with a detection reagent. In one example, the detection reagent includes enzyme-labeled fluorescence reagents or calorimetric reagents. In one specific non-limiting example, the detection reagent is enzyme-labeled fluorescence reagent (ELF) from Molecular Probes, Inc. (Eugene, Oreg.). The hybridized complex can then be placed on a detection device, such as an ultraviolet (UV) transilluminator (manufactured by UVP, Inc. of Upland, Calif.). The signal is developed and the increased signal intensity can be recorded with a recording device, such as a charge coupled device (CCD) camera (manufactured by Photometrics, Inc. of Tucson, Ariz.).

[0221] In particular examples, these steps are not performed when radiolabels are used.

[0222] In particular examples, the method further includes quantification, for instance by determining the amount of hybridization.

### Allele Specific PCR

[0223] Allele-specific PCR differentiates between target regions differing in the presence of absence of a variation or polymorphism. PCR amplification primers are chosen based upon their complementarity to the target sequence, such as a sequence disclosed herein. The primers bind only to certain alleles of the target sequence. This method is described by Gibbs, Nucleic Acid Res. 17:12427 2448, 1989.

### Allele Specific Oligonucleotide Screening Methods

[0224] Further screening methods employ the allele-specific oligonucleotide (ASO) screening methods (e.g. see Saiki et al., Nature 324:163-166, 1986).

[0225] Oligonucleotides with one or more base pair mismatches are generated for any particular allele. ASO screening methods detect mismatches between one allele in the target genomic or PCR amplified DNA and the other allele, showing decreased binding of the oligonucleotide relative to the second allele (i.e. the other allele) oligonucleotide. Oligonucleotide probes can be designed that under low stringency will bind to both polymorphic forms of the allele, but which at high stringency, bind to the allele to which they correspond. Alternatively, stringency conditions can be devised in which an essentially binary response is obtained, i.e., an ASO corresponding to a variant form of the target gene will hybridize to that allele, and not to the wildtype allele.

### Ligase Mediated Allele Detection Method

[0226] Ligase can also be used to detect point mutations, such as the SNPs in Table 3 in a ligation amplification reaction (e.g. as described in Wu et al., Genomics 4:560-569, 1989). The ligation amplification reaction (LAR) utilizes amplification of specific DNA sequence using sequential rounds of template dependent ligation (e.g. as described in Wu, supra, and Barany, Proc. Nat. Acad. Sci. 88:189-193, 1990).

### Denaturing Gradient Gel Electrophoresis

[0227] Amplification products generated using the polymerase chain reaction can be analyzed by the use of denaturing gradient gel electrophoresis. Different alleles can be identified based on the different sequence-dependent melting properties and electrophoretic migration of DNA in solution. DNA molecules melt in segments, termed melting domains, under conditions of increased temperature or denaturation.

[0228] Each melting domain melts cooperatively at a distinct, base-specific melting temperature (Tm). Melting domains are at least 20 base pairs in length, and can be up to several hundred base pairs in length.

[0229] Differentiation between alleles based on sequence specific melting domain differences can be assessed using polyacrylamide gel electrophoresis, as described in Chapter 7 of Erlich, ed., PCR Technology, Principles and Applications for DNA Amplification, W. H. Freeman and Co., New York (1992).

[0230] Generally, a target region to be analyzed by denaturing gradient gel electrophoresis is amplified using PCR primers flanking the target region. The amplified PCR product is applied to a polyacrylamide gel with a linear denaturing gradient as described in Myers et al., Meth. Enzymol. 155:501-527, 1986, and Myers et al., in Genomic Analysis, A Practical Approach, K. Davies Ed. IRL Press Limited, Oxford, pp. 95 139, 1988. The electrophoresis system is maintained at a temperature slightly below the Tm of the melting domains of the target sequences.

[0231] In an alternative method of denaturing gradient gel electrophoresis, the target sequences can be initially attached to a stretch of GC nucleotides, termed a GC clamp, as described in Chapter 7 of Erlich, supra. In one example, at least 80% of the nucleotides in the GC clamp are either guanine or cytosine. In another example, the GC clamp is at least 30 bases long. This method is particularly suited to target sequences with high Tm's.

[0232] Generally, the target region is amplified by the polymerase chain reaction as described above. One of the oligonucleotide PCR primers carries at its 5′ end, the GC clamp region, at least 30 bases of the GC rich sequence, which is incorporated into the 5′ end of the target region during amplification. The resulting amplified target region is run on an electrophoresis gel under denaturing gradient conditions as described above. DNA fragments differing by a single base change will migrate through the gel to different positions, which can be visualized by ethidium bromide staining.

### Temperature Gradient Gel Electrophoresis

[0233] Temperature gradient gel electrophoresis (TGGE) is based on the same underlying principles as denaturing gradient gel electrophoresis, except the denaturing gradient is produced by differences in temperature instead of differences in the concentration of a chemical denaturant. Standard TGGE utilizes an electrophoresis apparatus with a temperature gradient running along the electrophoresis path. As samples migrate through a gel with a uniform concentration of a chemical denaturant, they encounter increasing temperatures. An alternative method of TGGE, temporal temperature gradient gel electrophoresis (TTGE or tTGGE) uses a steadily increasing temperature of the entire electrophoresis gel to achieve the same result. As the samples migrate through the gel the temperature of the entire gel increases, leading the samples to encounter increasing temperature as they migrate through the gel. Preparation of samples, including PCR amplification with incorporation of a GC clamp, and visualization of products are the same as for denaturing gradient gel electrophoresis.

### Single-Strand Conformation Polymorphism Analysis

[0234] Target sequences or alleles can be differentiated using single-strand conformation polymorphism analysis, which identifies base differences by alteration in electrophoretic migration of single stranded PCR products, for example as described in Orita et al., Proc. Nat. Acad. Sci. 85:2766-2770, 1989. Amplified PCR products can be generated as described above, and heated or otherwise denatured, to form single stranded amplification products. Single-stranded nucleic acids can refold or form secondary structures which are partially dependent on the base sequence. Thus, electrophoretic mobility of single-stranded amplification products can detect base-sequence difference between alleles or target sequences.

### Chemical or Enzymatic Cleavage of Mismatches

[0235] Differences between target sequences can also be detected by differential chemical cleavage of mismatched base pairs, for example as described in Grompe et al., Am. J. Hum. Genet. 48:212-222, 1991. In another method, differences between target sequences can be detected by enzymatic cleavage of mismatched base pairs, as described in Nelson et al., Nature Genetics 4:11-18, 1993. Briefly, genetic material from an animal and an affected family member can be used to generate mismatch free heterohybrid DNA duplexes. As used herein, ‘heterohybrid’ means a DNA duplex strand comprising one strand of DNA from one animal, and a second DNA strand from another animal, usually an animal differing in the phenotype for the trait of interest.

### Non-Gel Systems

[0236] Other possible techniques include non-gel systems such as TaqMan™ (Perkin Elmer). In this system oligonucleotide PCR primers are designed that flank the mutation in question and allow PCR amplification of the region. A third oligonucleotide probe is then designed to hybridize to the region containing the base subject to change between different alleles of the gene. This probe is labeled with fluorescent dyes at both the 5′ and 3′ ends. These dyes are chosen such that while in this proximity to each other the fluorescence of one of them is quenched by the other and cannot be detected. Extension by Taq DNA polymerase from the PCR primer positioned 5′ on the template relative to the probe leads to the cleavage of the dye attached to the 5′ end of the annealed probe through the 5′ nuclease activity of the Taq DNA polymerase. This removes the quenching effect allowing detection of the fluorescence from the dye at the 3′ end of the probe. The discrimination between different DNA sequences arises through the fact that if the hybridization of the probe to the template molecule is not complete, i.e. there is a mismatch of some form, the cleavage of the dye does not take place. Thus only if the nucleotide sequence of the oligonucleotide probe is completely complimentary to the template molecule to which it is bound will quenching be removed. A reaction mix can contain two different probe sequences each designed against different alleles that might be present thus allowing the detection of both alleles in one reaction.

### Primer Design Strategy

[0237] Increased use of polymerase chain reaction (PCR) methods has stimulated the development of many programs to aid in the design or selection of oligonucleotides used as primers for PCR. Four examples of such programs that are freely available via the Internet are: PRIMER by Mark Daly and Steve Lincoln of the Whitehead Institute (UNIX, VMS, DOS, and Macintosh), Oligonucleotide Selection Program (OSP) by Phil Green and LaDeana Hiller of Washington University in St. Louis (UNIX, VMS, DOS, and Macintosh), PGEN by Yoshi (DOS only), and Amplify by Bill Engels of the University of Wisconsin (Macintosh only).

[0238] Generally these programs help in the design of PCR primers by searching for bits of known repeated-sequence elements and then optimizing the Tm by analyzing the length and GC content of a putative primer. Commercial software is also available 35 and primer selection procedures are rapidly being included in most general sequence analysis packages.

[0239] Designing oligonucleotides for use as either sequencing or PCR primers to detect requires selection of an appropriate sequence that specifically recognizes the target, and then testing the sequence to eliminate the possibility that the oligonucleotide will have a stable secondary structure. Inverted repeats in the sequence can be identified using a repeat-identification or RNA-folding programs.

[0240] If a possible stem structure is observed, the sequence of the primer can be shifted a few nucleotides in either direction to minimize the predicted secondary structure.

[0241] When the amplified sequence is intended for subsequence cloning, the sequence of the oligonucleotide should also be compared with the sequences of both strands of the appropriate vector and insert DNA. Obviously, a sequencing primer should only have a single match to the target DNA. It is also advisable to exclude primers that have only a single mismatch with an undesired target DNA sequence. For PCR primers used to amplify genomic DNA, the primer sequence should be compared to the sequences in the GenBank database to determine if any significant matches occur. If the oligonucleotide sequence is present in any known DNA sequence or, more importantly, in any known repetitive elements, the primer sequence should be changed.

[0242] Embodiments of the present invention involve transformation of plants with a polynucleotide according to the present invention. The polynucleotide may, for example, be recovered from the cells of a natural host, or it may be synthesized directly in vitro. Extraction from the natural host enables the isolation de novo of novel sequences, whereas in vitro DNA synthesis generally requires pre-existing sequence information. Direct chemical in vitro synthesis can be achieved by sequential manual synthesis or by automated procedures. DNA sequences may also be constructed by standard techniques of annealing and ligating fragments, or by other methods known in the art. Examples of such cloning procedures are given in Sambrook et al. (1989).

[0243] The polynucleotide may be isolated by direct cloning of segments of plant genomic DNA. Suitable segments of genomic DNA may be obtained by fragmentation using restriction endonucleases, sonication, physical shearing, or other methods known in the art. A DNA sequence may be obtained by identification of a sequence which is known to be expressed in a different organism, and then isolating the homologous coding sequence from an organism of choice. A coding sequence may be obtained by the isolation of messenger RNA (mRNA or polyA+ RNA) from plant tissue or isolation of a protein and performing “back-translation” of its sequence. The tissue used for RNA isolation is selected on the basis that suitable gene coding sequences are believed to be expressed in that tissue at optimal levels for isolation.

[0244] Various methods for isolating mRNA from plant tissue are well known to those skilled in the art, including for example using an oligo-dT oligonucleotide immobilised on an inert matrix. The isolated mRNA may be used to produce its complementary DNA sequence (cDNA) by use of the enzyme reverse transcriptase (RT) or other enzymes having reverse trancriptase activity. Isolation of an individual cDNA sequence from a pool of cDNAs may be achieved by cloning into bacterial or viral vectors, or by employing the polymerase chain reaction (PCR) with selected oligonucleotide primers. The production and isolation of a specific cDNA from mRNA may be achieved by a combination of the reverse transcription and PCR steps in a process known as RT-PCR.

[0245] Various methods may be employed to improve the efficiency of isolation of the desired sequence through enrichment or selection methods including the isolation and comparison of mRNA (or the resulting single or double-stranded cDNA) from more than one source in order to identify those sequences expressed predominantly in the tissue of choice. Numerous methods of differential screening, hybridisation, or cloning are known to those skilled in the art including cDNA-AFLP, cascade hybridisation, and commercial kits for selective or differential cloning.

[0246] The selected cDNA may then be used to evaluate the genomic features of its gene of origin, by use as a hybridisation probe in a Southern blot of plant genomic DNA to reveal the complexity of the genome with respect to that sequence. Alternatively, sequence information from the cDNA may be used to devise oligonucleotides and these can be used in the same way as hybridisation probes; for PCR primers to produce hybridisation probes, or for PCR primers to be used in direct genome analysis.

[0247] Similarly the selected cDNA may be used to evaluate the expression profile of its gene of origin, by use as a hybridisation probe in a Northern blot of RNA extracted from various plant tissues, or from a developmental or temporal series. Again sequence information from the cDNA may be used to devise oligonucleotides which can be used as hybridisation probes, to produce hybridisation probes, or directly for RT-PCR. The selected cDNA, or derived oligonucleotides, may then be used as a hybridisation probe to challenge a library of cloned genomic DNA fragments and identify overlapping DNA sequences.

[0248] In embodiments of the present invention, the polynucleotide according to the present invention may be coupled to a promoter which directs expression of SEQ ID NO 1, 2, 3, 4, 5, 6, 7, 8, 9, 10, 11, 12, 13, 14, 15, 16, 17, 18, 19, 20, 21, 22, 23, 24 or 25 or the corresponding cDNA in the transgenic plant. The term “promoter” may be used to refer to a region of DNA sequence located upstream of (i.e. 5′ to) the gene coding sequence which is recognised by and bound by RNA polymerase in order for transcription to be initiated.

[0249] In further embodiments of the present invention, the polynucleotide according to the present invention may be coupled to a promoter which directs expression of a nucleotide sequence encoding the polypeptide of SEQ ID NO 26, 27, 28, 29, 30, 31, 32, 33, 34, 35, 36, 37, 38 or 39 in the transgenic plant.

[0250] There are, broadly speaking, four types of promoters found in plant tissues; constitutive, tissue-specific, developmentally-regulated, and inducible/repressible, although it should be understood that these types are not necessarily mutually exclusive.

[0251] A constitutive promoter directs the expression of a gene throughout the various parts of a plant continuously during plant development, although the gene may not be expressed at the same level in all cell types. Examples of known constitutive promoters include those associated with the cauliflower mosaic virus 35S transcript (Odell et al, 1985), the rice actin 1 gene (Zhang et al, 1991) and the maize ubiquitin 1 gene (Cornejo et al., 1993). Constitutive promoters such as the Carnation Etched Ring Virus (CERV) promoter (Hull et al., 1986) are particularly preferred in the present invention.

[0252] A tissue-specific promoter is one which directs the expression of a gene in one (or a few) parts of a plant, usually throughout the lifetime of those plant parts. The category of tissue-specific promoter commonly also includes promoters whose specificity is not absolute, i.e. they may also direct expression at a lower level in tissues other than the preferred tissue. Examples of tissue-specific promoters known in the art include those associated with the patatin gene expressed in potato tuber and the high molecular weight glutenin gene expressed in wheat, barley or maize endosperm.

[0253] A developmentally-regulated promoter directs a change in the expression of a gene in one or more parts of a plant at a specific time during plant development. The gene may be expressed in that plant part at other times at a different (usually lower) level, and may also be expressed in other plant parts.

[0254] An inducible promoter is capable of directing the expression of a gene in response to an inducer. In the absence of the inducer the gene will not be expressed. The inducer may act directly upon the promoter sequence, or may act by counteracting the effect of a repressor molecule. The inducer may be a chemical agent such as a metabolite, a protein, a growth regulator, or a toxic element, a physiological stress such as heat, wounding, or osmotic pressure, or an indirect consequence of the action of a pathogen or pest. A developmentally-regulated promoter might be described as a specific type of inducible promoter responding to an endogenous inducer produced by the plant or to an environmental stimulus at a particular point in the life cycle of the plant. Examples of known inducible promoters include those associated with wound response, such as described by Warner et al (1993), temperature response as disclosed by Benfey & Chua (1989), and chemically induced, as described by Gatz (1995).

[0255] In certain embodiments of the present invention, the polynucleotide may be transformed into plant cells leading to controlled expression under the direction of a promoter. The promoters may be obtained from different sources including animals, plants, fungi, bacteria, and viruses, and different promoters may work with different efficiencies in different tissues. Promoters may also be constructed synthetically.

[0256] Exogenous genes/polynucleotides may be introduced into plants according to the present invention by means of suitable plant transformation vectors. A plant transformation vector may comprise an expression cassette comprising 5′-3′ in the direction of transcription, a promoter sequence, a coding sequence comprising SEQ ID NO 1, 2, 3, 4, 5, 6, 7, 8, 9, 10, 11, 12, 13, 14, 15, 16, 17, 18, 19, 20, 21, 22, 23, 24 or 25 or the corresponding cDNA and, optionally a 3′ untranslated, terminator sequence including a stop signal for RNA polymerase and a polyadenylation signal for polyadenylase. Preferably the vector comprises a coding sequence comprising a nucleotide sequence encoding the polypeptide of SEQ ID NO 26, 27, 28, 29, 30, 31, 32, 33, 34, 35, 36, 37, 38 or 39. The promoter sequence may be present in one or more copies, and such copies may be identical or variants of a promoter sequence as described above. The terminator sequence may be obtained from plant, bacterial or viral genes. Suitable terminator sequences are the pea rbcS E9 terminator sequence, the nos terminator sequence derived from the nopaline synthase gene of Agrobacterium tumefaciens and the 35S terminator sequence from cauliflower mosaic virus, for example. A person skilled in the art will be readily aware of other suitable terminator sequences.

[0257] The expression cassette may also comprise a gene expression enhancing mechanism to increase the strength of the promoter. An example of such an enhancer element is that derived from a portion of the promoter of the pea plastocyanin gene, and which is the subject of International Patent Application No. WO 97/20056. These regulatory regions may be derived from the same gene as the promoter DNA sequence or may be derived from different genes, from Selex schwerinii, Selex viminalis or Populus trichocarpa or other organisms, for example from a plant of the family Solanaceae, or from the subfamily Cestroideae. All of the regulatory regions should be capable of operating in cells of the tissue to be transformed.

[0258] The promoter DNA sequence may be derived from the same gene as SEQ ID NO 1, 2, 3, 4, 5, 6, 7, 8, 9, 10, 11, 12, 13, 14, 15, 16, 17, 18, 19, 20, 21, 22, 23, 24 or 25 or the corresponding cDNA used in the present invention or may be derived from a different gene.

[0259] The promoter DNA sequence may be derived from the same gene which comprises the nucleotide sequence encoding the polypeptide of SEQ ID NO 26, 27, 28, 29, 30, 31, 32, 33, 34, 35, 36, 37, 38 or 39 used in the present invention or may be derived from a different gene.

[0260] The expression cassette may be incorporated into a basic plant transformation vector, such as pBIN 19 Plus, pBI 101, or other suitable plant transformation vectors known in the art. In addition to the expression cassette, the plant transformation vector will contain such sequences as are necessary for the transformation process. These may include the Agrobacterium vir genes, one or more T-DNA border sequences, and a selectable marker or other means of identifying transgenic plant cells.

[0261] The term “plant transformation vector” means a construct capable of in vivo or in vitro expression. Preferably, the expression vector is incorporated in the genome of the organism. The term “incorporated” preferably covers stable incorporation into the genome.

[0262] Techniques for transforming plants are well known within the art and include Agrobacterium-mediated transformation, for example. The basic principle in the construction of genetically modified plants is to insert genetic information in the plant genome so as to obtain a stable maintenance of the inserted genetic material. A review of the general techniques may be found in articles by Potrykus (Annu Rev Plant Physiol Plant Mol Biol [1991] 42:205-225) and Christou (Agro-Food-Industry Hi-Tech March/April 1994 17-27).

[0263] Typically, in Agrobacterium-mediated transformation a binary vector carrying a foreign DNA of interest, i.e. a chimaeric gene, is transferred from an appropriate Agrobacterium strain to a target plant by the co-cultivation of the Agrobacterium with explants from the target plant. Transformed plant tissue is then regenerated on selection media, which selection media comprises a selectable marker and plant growth hormones. An alternative is the floral dip method (Clough & Bent, 1998) whereby floral buds of an intact plant are brought into contact with a suspension of the Agrobacterium strain containing the chimeric gene, and following seed set, transformed individuals are germinated and identified by growth on selective media. Direct infection of plant tissues by Agrobacterium is a simple technique which has been widely employed and which is described in Butcher D. N. et al., (1980), Tissue Culture Methods for Plant Pathologists, eds.: D. S. Ingrams and J. P. Helgeson, 203-208.

[0264] Further suitable transformation methods include direct gene transfer into protoplasts using polyethylene glycol or electroporation techniques, particle bombardment, micro-injection and the use of silicon carbide fibres for example.

[0265] Transforming plants using ballistic transformation, including the silicon carbide whisker technique are taught in Frame B R, Drayton P R, Bagnaall S V, Lewnau C J, Bullock W P, Wilson H M, Dunwell J M, Thompson J A & Wang K (1994). Production of fertile transgenic maize plants by silicon carbide whisker-mediated transformation is taught in The Plant Journal 6: 941-948) and viral transformation techniques is taught in for example Meyer P, Heidmann I & Niedenhof I (1992). The use of cassava mosaic virus as a vector system for plants is taught in Gene 110: 213-217. Further teachings on plant transformation may be found in EP-A-0449375.

[0266] In a further aspect, the present invention relates to a vector system which carries a nucleotide sequence according to the present invention and introducing it into the genome of an organism, such as a plant. The vector system may comprise one vector, but it may comprise two vectors. In the case of two vectors, the vector system is normally referred to as a binary vector system. Binary vector systems are described in further detail in Gynheung An et al., (1980), Binary Vectors, Plant Molecular Biology Manual A3, 1-19.

[0267] One extensively employed system for transformation of plant cells uses the Ti plasmid from Agrobacterium tumefaciens or a Ri plasmid from Agrobacterium rhizogenes An et al., (1986), Plant Physiol. 81, 301-305 and Butcher D. N. et al., (1980), Tissue Culture Methods for Plant Pathologists, eds.: D. S. Ingrams and J. P. Helgeson, 203-208. After each introduction method of the desired exogenous gene according to the present invention in the plants, the presence and/or insertion of further DNA sequences may be necessary. If, for example, for the transformation the Ti- or Ri-plasmid of the plant cells is used, at least the right boundary and often however the right and the left boundary of the Ti- and Ri-plasmid T-DNA, as flanking areas of the introduced genes, can be connected. The use of T-DNA for the transformation of plant cells has been intensively studied and is described in EP-A-120516; Hoekema, in: The Binary Plant Vector System Offset-drukkerij Kanters B. B., Alblasserdam, 1985, Chapter V; Fraley, et al., Crit. Rev. Plant Sci., 4:1-46; and An et al., EMBO J. (1985) 4:277-284.

[0268] Plant cells transformed with nucleotides of the present invention may be grown and maintained in accordance with well-known tissue culturing methods such as by culturing the cells in a suitable culture medium supplied with the necessary growth factors such as amino acids, plant hormones, vitamins, etc.

[0269] The “transgenic plant” in relation to the present invention may include any plant that comprises an exogenous polynucleotide/gene according to the present invention or any plant has been modified to up or down regulate expression of the endogenous gene/polynucleotide. Preferably the exogenous gene/polynucleotide is incorporated in the genome of the plant.

[0270] In one aspect, a nucleic acid sequence, plant transformation vector or plant cell according to the present invention is in an isolated form. The term “isolated” means that the sequence is at least substantially free from at least one other component with which the sequence is naturally associated in nature and as found in nature.

[0271] In one aspect, a nucleic acid sequence, plant transformation vector or plant cell according to the invention is in a purified form. The term “purified” means in a relatively pure state—e.g. at least about 90% pure, or at least about 95% pure or at least about 98% pure.

[0272] The plants which are transformed with an exogenous gene according to the present invention include but are not limited to monocotyledonous and dicotyledonous fodder crops, forage crops, ornamental crops, fruit crops, food crops, algae, forestry trees, bioenergy crops and biofuel crops including the following species and species hybrids: Acacia spp., Acer spp., Actinidia ssp., Agave spp., Agropyron spp., Agrostis spp., Allium spp., Alnus spp., Alopecurus spp., Amaranthus spp., Ananas spp., Apium spp., Arachis spp., Areca spp., Arundo spp., Arrhenatherum spp., Asparagus spp; Avena spp., Atriplex spp., Attalea spp., Beta spp., Betula spp., Brassica spp., Bromus spp., Bouteloua spp., Camelina spp., Camellia spp., Cannabis spp., Capsicum spp., Carica spp., Carex spp., Carthamus spp., Castanea spp., Carum spp., Cinnamomum spp., Citrus spp., Cocos spp., Coffea spp., Corchorus spp., Cotoneatser spp., Cucurbita spp., Cupressus spp., Cynodon spp., Daucus spp., Dactylis spp., Eucalyptus spp., Elaeis spp., Eleusine spp., Fagus spp., Festuca spp., Ficus spp., Fraxinus spp., Geranium spp., Ginkgo spp., Glycine spp., Gossypium spp., Helianthus spp., Hemerocallis spp., Heracleum spp., Hedysarum spp., Hibiscus spp., Hordeum spp., Indigo spp., Ipomoea spp., Lettuca spp., Jatropha spp., Lotus spp., Lactuca spp., Lathyrus spp., Lens spp., Linum spp., Lolium spp., Lupinus spp., Lezula spp., Lycopersicon spp., Malus spp., Manihot spp., Medicago spp., Melilotus spp., Mentha spp., Miscanthus spp., Musa spp., Nicotiana spp., Olea spp., Onobrychis spp., Ophiopogon spp., Oryza spp., Panicum spp., Papaver spp., Petunia spp., Phaseolus spp., Pennisetum spp., Phalaris spp., Phoenix spp., Phleum spp., Phyllostachys spp., Physalis spp., Panicum spp., Picea spp., Pinus spp., Pistacia spp., Pisum spp., Poa spp., Podocarpus spp., Pogmania spp., Populus spp., Prunus spp., Quercus spp., Ribes spp., Robinia spp., Rosa spp., Raphanus spp., Rheum spp., Ricinus spp., Rubus spp., Salix spp., Sequoia spp., Sesamum spp., Setaria spp., Saccharum spp., Sambucus spp., Secale spp., Sinapis spp., Solanum spp., Sorghum spp., Trifolium spp., Triticum spp., Triticosecale spp., Trisetum spp., Tagetes spp., Theobroma spp., Triadica spp., Vicia spp., Vitis spp., Vigna spp., Viola spp., Watsonia spp., Zea spp. amongst others.

### EXAMPLES

### Example 1

### Plant Material

[0273] This study focuses on the K8 willow mapping population. This population comprises 947 full-sib individuals and was produced at Long Ashton Research Station (LARS), in 1999. The pedigree of the population is shown in Table 1.

[0274] The population was established in a field experiment at LARS in 2000 and later at Rothamsted Research (RRes), Harpenden, Herts, UK in 2003. Six clonal replicates of each K8 genotype were planted as single plots, each in a 2×3 arrangement within the field experiment. Plots were arranged in a 52×23 plot row by column design. To facilitate identification of any environmental inconsistencies across the trial site, and to allow subsequent adjustment of trait values prior to QTL analyses, a reference willow variety was planted at 64 pre-selected plot positions throughout the site. The biomass cultivar, S. viminalis var. Jorr, was selected for this role at the LARS site and the cultivar Bowles Hybrid was used at RRes. These control genotypes were also used to surround the entire site to minimise any edge effects and also to form internal tramline columns after every fourth (RRes) or fifth (LARS) column of K8 progeny. Progeny were arranged in random order in the design. For additional details, see Hanley S J (2003) Genetic mapping of important agronomic traits in biomass willow. PhD thesis, University of Bristol, UK (Hanley, 2003).

[0275] Both plantations were established from 15 cm stem cuttings, allowed to grow for one year, after which the plants were coppiced during the winter by removing the first year's growth from the stool. Plants were then allowed to grow for a further two years before a second cutback. Plants were then coppiced after each period of three seasons of growth.

### Trait Measurements

[0276] Trait measurements were made according to Table 2 below.

TABLE 2

[chemical structure]

*: trait measured on 480 progeny only
†: RRes data available Spring 2008
‡: stem diameters measured at 55 cm from the stool

[0277] Trait data was first analysed for spatial inconsistencies across the trial site and data adjusted to account for this. The method of Residual Maximum Likelihood (REML) (Patterson and Thompson 1971; Robinson et al. 1982) was used to fit mixed (involving fixed and random effects) models (Searle et al. 1992) to the trait data, employing GenStat software (©Sixth Edition, Lawes Agricultural Trust, Rothamsted Experimental Station, 2002). Using theory developed by Gleeson and Cullis (1987), Cullis and Gleeson (1991) and Cullis et al. (1998), the most appropriate model to correctly describe the effects of spatial trends, defined as autoregressive components for rows and or columns, for data from each assessment was identified. This utilised the trait information provided by a reference genotypes (Jorr or Bowles Hybrid). Changes in model deviance (Genstat Committee 1993) were used to assess the significance (P<0.05) of any extra (spatial) terms in models, these changes being asymptotically distributed as chi-squared on degrees of freedom equal to the number of extra parameters.

[0278] Adjusted trait scores were then utilised in QTL analysis according to standard methodologies as included in the software package MapQTL (Kyazma).

### Identification and High Resolution Mapping of the Yield QTL

[0279] The yield QTL was first identified following an initial QTL screen based on K8 progeny numbers 1-480 only. The K8 linkage map comprised amplified fragment length polymorphism (AFLP) and microsatellite markers. In addition, a genome-wide set of Single Nucleotide Polymorphism (SNP) markers was developed and included in analysis for aligning the K8 willow map to the publicly-available poplar genome sequence. Further details of this approach are available in Hanley, S. J., Mallott, M. D. & Karp A. (2006) Tree Genetics and Genomes, 3, 35-48

[0280] Once the approximate position of the QTL was determined (on Linkage Group X; Linkage group nomenclature is a provided for the poplar genome sequence; http://genome.jgi-psf.org/Poptr1_{—}1/Poptr1_{—}1.home.html) through the initial QTL screen, an additional 11 SNP markers were developed to target this region to increase mapping resolution and further delimit the locus. The SNP markers were derived from sequencing willow orthologues of genes in this region of the poplar genome sequence. Full details of the method developed for identifying SNP markers are described in Hanley, S. J., Mallott, M. D. & Karp A. (2006) Tree Genetics and Genomes, 3, 35-48.

| | | Forward PCR | Reverse PCR | | |
|---|---|---|---|---|---|
| Marker | Class | primer(5′→3′) | primer (5′→3′) | SNapShot primer | Type |
| X_15341094* | SNP | GGGAAACAGATAGTGGGCAGTC | GCCTCCTTCTCCTGTAAGCAC | ACCTTAACCTGCAGCTCTTACCITAA | ACxAC |
| X_15478832 | SNP | TGATGCCTCCAAAGGTTTCTC | TCCTGGCGTGTTCATAGAGGT | GATGGGAAGTAAAAATTATCCGAGCAAGAT | ACxAC |
| X_15533399 | SNP | GTGGCTCTTCTCCATTGCTGT | GTGCTTTTTGCTCCACCTTTG | AATAGCAAATATGGGGGCTT | ATxAT |
| x_15727779 | SNP | AGAAGGGATGTGCCAAAGTGA | ACAAGCTGGATTGGTGGAAGA | ACTTTTGATATTTTCTAACCTTTTCTCTTA | CTxCT |
| | | | | TTGTA | |
| X_15758822 | SSR | CAAAAACGCACCCTATTCTTCC | CCAGAGTCCCCTTGAACACAC | — | abxac |
| X_15777280 | SNP | AAAACAACCTCCCTCCCTTGA | TCTGCAAGCCCACTTTTTCTT | TTTGAGGAAGACGGCAAATG | TGxTG |
| X_15905315 | SNP | CAACATATTGTGGATGCAGga | CAGTGATACAATGTCTGCAAGGA | AGGATTTCCCACAGATTGGTTTCAC | CGxCG |
| X_15917077 | SNP | TTCCTTGTTTTGGCTTTGGTG | CCATCGCCTGTATCCACACTT | ATTCAGCTGTCGAATTGATTGATT | TGxTG |
| X:15951166 | SNP | TGGTGAGCGAGAGTACGTGAA | AATCTTCCTGGCCCTCAAAAC | GGGTATGCTCAGCCTGCC | ACxAC |
| X:15945623 | SNP | ATTGGAATCTCTTGGGGCTTT | CACCTGCTCCATAATCCCTCT | TCATTGATAACTGCTATTGTTCCCCAGA | AGxAG |
| X:15958515 | SNP | CAGAGACCCAAATGGACTGGA | AACGACCTAATCCCCTGGAAA | TCAATGCATGACGGTGTTCTTGTGGTGACA | AGxAG |
| | | | | GT | |

*It should be noted that the marker numbers do not necessarily refer to the most up date position available in the poplar genome and this may change due to ongoing annotation and assembly.

[0281] All of these SNP markers were heterozygous in both mapping population parents (S3 & R13) and segregated according to the expected 1:2:1 (AA:AB:BB) ratio in the progeny. All 11 markers were used to genotype the 947 individuals of the mapping population. Forty three individuals were not included in subsequent analysis as genotyping failed in some instances and some plants had died in the field and DNA for screening was no longer available. A fine-scale linkage map was then calculated based on the 11 markers. The order of markers on the willow map is co-linear with the poplar genome sequence.

[0282] The resulting linkage map spanned 5.1 cM. This map was used in conjunction with the genotype and trait data in a second round of QTL analysis. Results of interval mapping are shown in FIG. 13 for total fresh weight for two harvest years at the LARS site (2003 & 2006) and for the RRes site in 2005. QTL for maximum stem diameter and maximum stem height are also shown for both sites for equivalent years. These traits are highly correlated with total harvestable yield in this population (Hanley S J (2003) Genetic mapping of important agronomic traits in biomass willow. PhD thesis, University of Bristol, UK).

[0283] The sequences for willow markers X_{—}15341094, X_{—}15758822, X_{—}15905315 and X_{—}15958515 also yielded SNPs that were specific to each parent indicating that there are three haplotypes segregating in this region in the K8 population. Due to the nature of the cross that generated the K8 population, there is a maximum of three alleles segregating at any given locus in this population. As explained in Example 2, the female parent of the cross, cultivar ‘S3’ was found to produce two alleles of different length (A & B). The male parent, cultivar ‘R13’ was found to contain two alleles (A & C) where A is a common allele that is present in S3. The diploid K8 mapping population can therefore inherit the following combinations of alleles: AA, AB, AC, BC. As indicated in Example 2, allele C is associated with increased harvestable biomass yield when compared to the contribution of allele A to harvestable biomass yield.

Sequence analysis of the QTL region based on the poplar genome.

[0284] QTL indicates that the most likely position of the QTL is between markers X_{—}15727779 and X_{—}15917077. The position of these markers in the poplar genome was determined by BLASTN homology searches using the willow sequence used to derive the SNP markers.

[0285] The homologous genomic region in poplar is predicted to contain 10 genes. These are referred to as Xyld1, Xyld2, Xyld3, Xyld4, Xyld5, Xyld6, Xyld7, Xyld8, Xyld9 and Xyld10. The physical size of this region is predicted to be 196118 base pairs in length. However, a gap in the public sequence prevents an accurate measure of the length. Eight of the genes have EST sequence to support their expression.

[0286] Two willow BAC clones have been identified that cover the region delimited by the two markers. Partial sequencing of these clones indicates that homologues to 9 of the 10 genes within the QTL region in poplar can be identified in willow plant ‘R13’. ‘R13’ contains two alleles (A and C) and FIG. 2 shows the sequence of the QTL region of allele A. Alleles A and C of the 9 willow genes were identified using routine techniques and are shown in the Figures.

[0287] The amino acid sequences of the polypeptides encoded by Alleles A and C of the 9 willow genes are shown in the Figures. These were identified using cDNA sequences that allowed exons in the gene sequences to be identified and thus the polypeptide sequence to be predicted. The cDNA sequences were predicted by full sequencing of salix transcripts that allowed intron-exon boundaries to be identified. In some cases the exons were predicted using annotation information on the public poplar genome website. These predictions are based on transcript sequencing in poplar and gene prediction algorithms. Polypeptide sequences were predicted using partially sequenced willow transcripts in conjunction with public poplar genome annotation data which is based on gene finding algorithms and poplar transcript sequence information (Tuskan et al., 2006. The Genome of Black Cottonwood, Populus trichocarpa (Torr. & Gray) Science 313 p5793.”

[0288] Details of the genes are detailed below:

### 1. Xyld1

[0289] Shows best homology in Arabidopsis thaliana with Locus AT3G12740, or ALIS1 (ALA-Interacting Subunit). ALIS1 is a member of a family of phospholipid transporters (ALIS1-ALIS5) which are homologs of the Cdc50p/Lem3p family in yeast that are essential for the trafficking of yeast P4-ATPases. The Arabidopsis ALIS proteins are 27-30% identical to yeast Cdc50p and similarity ranges from 48-53%. In yeast ALIS1 shows strong affinity to ALA3. In Arabidopsis, ALA3 has been shown to be important for trans-Golgi proliferation of slime vesicles containing polysaccharides and enzymes for secretion. In yeast, ALA3 function requires interaction with the ALIS1. In Arabidopsis plants, ALIS1, like ALA3, is localised to membranes of Golgi-like structures and is expressed in root peripheral columella cells. It has been proposed that the ALIS1 protein is a β-sub-unit of ALA3 in Arabidopsis and that this protein is important part of the Golgi machinery in plants required for secretory processes during development.

### Relevant Publications

[0290] Poulsen L R, López-Marqués R L, McDowell S C, Okkeri J, Licht D, Schulz A, Pomorski T, Harper J F, Palmgren M G. 2008 The Arabidopsis P4-ATPase ALA3 localizes to the golgi and requires a beta-subunit to function in lipid translocation and secretory vesicle formation. Plant Cell. 3:658-76.

[0291] Bosco C D, Lezhneva L, Biehl A, Leister D, Strotmann H, Wanner G, Meurer J. 2004 Inactivation of the chloroplast ATP synthase gamma subunit results in high non-photochemical fluorescence quenching and altered nuclear gene expression in Arabidopsis thaliana. J Biol Chem.279(2):1060-9.

### 2. Xyld 2

[0292] Shows strongest homology to Arabidopsis thaliana gene ALDH5F1 (Locus AT1G79440; previous nomenclature SSADH; EC 1.2.1.24) which is a member of the aldehyde dehydrogenases (ALDHs) protein superfamily of NAD(P)C-dependent enzymes that oxidize a wide range of endogenous and exogenous aliphatic and aromatic aldehydes. The Arabidopsis genome contains 14 unique ALDH sequences encoding members of nine ALDH families, including eight known families and one novel family (ALDH22) that is currently known only in plants. Of these, there is one succinic semialdehyde dehydrogenase gene, ALDH5F1, which encodes a protein of 528 amino acids. ALDH5F1 is the only confirmed identified member of the succinic semialdehyde family in plants. The Arabidopsis protein is localized to mitochondria and a kinetic analysis showed that the recombinant enzyme was specific for succinic semialdehyde and regulated by adenine nucleotides. T-DNA knockout mutants of ALDH5F1 result in dwarfed plants with necrotic lesions and are sensitive to both ultraviolet-B light and heat stress. Plants with ssadh mutations accumulate elevated levels of H₂O₂, suggesting a role for this gene in stress regulation detoxification pathway plant, providing defense against environmental stress by preventing the accumulation of reactive oxygen species.

### Relevant Publications

[0293] Hueser, A F, UI L. 2008 Analysis of GABA-shunt metabolites in Arabidopsis thaliana 19th International Conference on Arabidopsis Research

[0294] Ludewig F, Hüser A, Fromm H, Beauclair L, Bouché N. 2008 Mutants of GABA transaminase (POP2) suppress the severe phenotype of succinic semialdehyde dehydrogenase (ssadh) mutants in Arabidopsis. PLoS ONE 3(10):e3383

[0295] Zybailov B, Rutschow H, Friso G, Rudella A, Emanuelsson O, Sun Q, van Wijk K J. 2008 Sorting signals, N-terminal modifications and abundance of the chloroplast proteome. PLoS ONE 3(4):e1994

[0296] Fait A, Yellin A, Fromm H. 2005 GABA shunt deficiencies and accumulation of reactive oxygen intermediates: insight from Arabidopsis mutants. FEBS Lett. 579(2):415-20

[0297] Kirch H H, Bartels D, Wei Y, Schnable P S, Wood A J. 2004 The ALDH gene superfamily of Arabidopsis. Trends Plant Sci. 9(8):371-7

[0298] Breitkreuz K E, Allan W L, Van Cauwenberghe O R, Jakobs C, Talibi D, Andre B, Shelp B J. 2003 A novel gamma-hydroxybutyrate dehydrogenase: identification and expression of an Arabidopsis cDNA and potential role under oxygen deficiency. J Biol Chem. 278(42):41552-6.

### 3. Xyld3

[0299] Shows strongest homology with Arabidopsis thaliana ALTERED PHLOEM DEVELOPMENT (APL) gene (Locus AT1G79430), which encodes a MYB coiled-coil-type transcription factor that is required for phloem identity in Arabidopsis. APL has been proposed to have a dual role both in promoting phloem differentiation and in repressing xylem differentiation during vascular development.

### Relevant Publications

[0300] Truernit E, Bauby H, Dubreucq B, Grandjean O, Runions J, Barthélémy J, Palauqui J C. 2008 High-resolution whole-mount imaging of three-dimensional tissue organization and gene expression enables the study of Phloem development and structure in Arabidopsis. Plant Cell. 20(6):1494-503

[0301] Lehesranta S, Lindgren O, Taehtiharju S, Carlsbecker A, Helariutta Y 2008 The role of APL as a transcriptional regulator in specifying vascular identity 19th International Conference on Arabidopsis Research

[0302] Carlsbecker A, Lindgren O, Bonke M, Thitamadee S, Tähtiharju S, Helariutta Y 2004 Genetic analysis of procambial development in the Arabidopsis root 15th International Conference on Arabidopsis Research

[0303] Bonke M, Hauser M-T, Helariutta Y 2002 The APL locus is required for phloem development in Arabidopsis roots. 13th International Conference on Arabidopsis Research

### 4. Xyld4

[0304] Show strongest homology in Arabidopsis thaliana to Locus AT1G79420. Function not yet described.

### 5. Xyld5

[0305] Shows strongest homology with AtOCT2 in Arabidopsis thaliana (Locus AT1G79360). ATOCT2 is one of six Arabidopsis organic cation/carnitine transporter (OCT)-like proteins, named AtOCT1-AtOCT6 (loci At1g73220, At1g79360, At1g16390, At3g20660, At1g79410 and At1g16370, respectively) that have been identified. These proteins cluster in a small subfamily within the ‘organic solute cotransporters’ included in the large sugar transporter family of the major facilitator superfamily (MFS). AtOCT1 shares features of organic cation/carnitine transporters (OCTs). In animals, mammalian plasma membrane OCTs are involved in homeostasis and distribution of various small endogenous amines (e.g. carnitine, choline) and detoxification of xenobiotics such as nicotine. AtOCT1 is able to transport carnitine in yeast and is likely to be involved in the transport of carnitine or related molecules across the plasma membrane in plants.

[0306] The orthologous gene sequence has not yet been identified in willow.

### Related Publication

[0307] Tohge T, Nishiyama Y, Hirai M Y, Yano M, Nakajima J, Awazuhara M, Inoue E, Takahashi H, Goodenowe D B, Kitayama M, Noji M, Yamazaki M, Saito K. 2005 Functional genomics by integrated analysis of metabolome and transcriptome of Arabidopsis plants over-expressing an MYB transcription factor. Plant J. 42(2):218-35

### 6. Xyld6

[0308] Shows best fit with ATOCT3 Arabidopsis ORGANIC CATION/CARNITINE TRANSPORTER2). ATOCT3 is one of six Arabidopsis organic cation/carnitine transporter (OCT)-like proteins, named AtOCT1-AtOCT6 (loci At1g73220, At1g79360, At1g16390, At3g20660, At1g79410 and At1g16370, respectively) referred to above. These proteins cluster in a small subfamily within the ‘organic solute cotransporters’ included in the large sugar transporter family of the major facilitator superfamily (MFS).

### Relevant Publications

[0309] Lelandais-Brière C, Jovanovic M, Tones G A, Perrin Y, Lemoine R, Corre-Menguy F, Hartmann C. 2007 Disruption of AtOCT1, an organic cation transporter gene, affects root development and carnitine-related responses in Arabidopsis. Plant J. 51(2):154-64

[0310] Price J, Laxmi A, St Martin S K, Jang J C. 2004 Global transcription profiling reveals multiple sugar signal transduction mechanisms in Arabidopsis. Plant Cell.16(8):2128-50

### 7. Xyld7

[0311] Shows homology with members of the R2R3-type MYB gene family in Arabidopsis. Although no functional data are available for most of the 125 R2R3-type AtMYB genes, a number of functions have been assigned concerning many aspects of plant secondary metabolism, as well as the identity and fate of plant cells. This includes regulation of phenylpropanoid metabolism, control of development and determination of cell fate and identity, plant responses to environmental factors and mediating hormone actions.

### Relevant Publications

[0312] Stracke R, Werber M, Weisshaar B. 2001 The R2R3-MYB gene family in Arabidopsis thaliana. Curr Opin Plant Biol. 4(5):447-56

[0313] Riechmann J L, Heard J, Martin G, Reuber L, Jiang C, Keddie J, Adam L, Pineda O, Ratcliffe O J, Samaha R R, Creelman R, Pilgrim M, Broun P, Zhang J Z, Ghandehari D, Sherman B K, Yu G. 2000 Arabidopsis transcription factors: genome-wide comparative analysis among eukaryotes. Science. 290(5499):2105-10

### 8. Xyld8

[0314] Shows best fit with ANAC028, Arabidopsis NAC domain containing protein (Locus AT1G65910). NAC (NAM, ATAF, and CUC) is a plant-specific gene family. NAC family transcription factors are involved in maintaining organ or tissue boundaries regulating the transition from growth by cell division to growth by cell expansion. Most NAC proteins contain a highly conserved N-terminal DNA-binding domain, a nuclear localization signal sequence, and a variable C-terminal domain. 75 and 105 NAC genes were predicted in the Oryza sativa and Arabidopsis genomes, respectively. The functions of only some of these have been described. The first reported NAC genes were NAM from petunia and CUC2 from Arabidopsis that participate in shoot apical meristem development. CUC1, CUC2 and nam are expressed at the boundaries between cotyledonary primordial and between floral organs and are specifically involved in shoot apical meristem formation and separation of cotyledons and floral organs. Other development-related NAC genes have been suggested with roles in controlling cell expansion of specific flower organs e.g. NAP or auxindependent formation of the lateral root system e.g. NAC1. Some of NAC genes, such as ATAF1 and ATAF2 genes from Arabidopsis and the StNAC gene from potato, are induced by pathogen attack and wounding. More recently, a few NAC genes, such as AtNAC072 (RD26), AtNAC019, AtNAC055 from Arabidopsis, and BnNAC from Brassica (31), were found to be involved in responses to environmental stress. Seven members of NAC family At2g18060, At4g36160, At5g66300, At1g12260, At1g62700, At5g62380, and At1g71930 have been designated as VASCULAR-RELATED NAC-DOMAIN PROTEIN 1 (VND1 to VND7). Members of these could induce transdifferentiation of various cells into metaxylem- and protoxylem-like vessel elements, respectively, in Arabidopsis and poplar. Similarly ANAC012 and ANAC073 also appear to have a role in xylem development and secondary wall thickening in Arabidopis.

### Relevant Publications

[0315] Ooka H, Satoh K, Doi K, Nagata T, Otomo Y, Murakami K, Matsubara K, Osato N, Kawai J, Caminci P, Hayashizaki Y, Suzuki K, Kojima K, Takahara Y, Yamamoto K, Kikuchi S. 2003 Comprehensive analysis of NAC family genes in Oryza sativa and Arabidopsis thaliana. DNA Res. 10(6):239-47

[0316] Riechmann J L, Heard J, Martin G, Reuber L, Jiang C, Keddie J, Adam L, Pineda O, Ratcliffe O J, Samaha R R, Creehnan R, Pilgrim M, Broun P, Zhang J Z, Ghandehari D, Sherman B K, Yu G. 2000 Arabidopsis transcription factors: genome-wide comparative analysis among eukaryotes. Science 290(5499):2105-109.

### Xyld9

[0317] Show strongest homology in Arabidopsis thaliana to Locus AT1G79390. The function of this expressed protein has not yet been described

### 10. Xyld10

[0318] Shows homology to the RGLG2 (RING DOMAIN LIGASE2) locus of Arabidopsis thaliana (Locus AT1G79380). In functional terms, the RING domain can basically be considered a protein-interaction domain. RING-finger proteins have been implicated in a range of diverse biological processes and biochemical activities, from transcriptional and translational regulation to targeted protein degradation.

### Relevant Publications

[0319] Kosarev P, Mayer K F, Hardtke C S. 2002 Evaluation and classification of RING-finger domains encoded by the Arabidopsis genome. Genome Biol. 3(4):RESEARCH 0016.1

### Example 2

[0320] Provided below is an example of the use of a diagnostic molecular marker derived from the QTL region that can be used to select for favourable alleles within a breeding programme:

[0321] A microsatellite marker was developed to screen for the three QTL alleles segregating in members of the K8 population of Salix. The microsatellite marker is amplified by PCR using the following pair of primers:

Forward primer
5′-CAAAAACGCACCCTATTCTTCC-3′
Reverse primer
5′-CCAGAGTCCCCTTGAACACAC-3′

[0322] The sequence of the amplified region for allele A (179bp) is:

CAAAAACGCACCCTATTCTTCCCTATTTGCATCGCATTTGTTCTTGAA
TCTCTTTGTATTCCCTGAGTCTCAGAGAGAGAGAGAGAGAGAGAGAGA
AGGAAAGAGAGAATGTTCCATACCAAGAAACCCTCAACTATGAATTCC
CATGATAGACCCATGTGTGTTCAAGGGGACTCTGG

[0323] These primers generate amplicons of three different lengths in the K8 mapping population and thus are informative for the three alleles that are segregating in the yield QTL region. The female parent of the cross, cultivar ‘S3’ produces two alleles of different length (A & B). The male parent, cultivar ‘R13’ contains two alleles (A & C) where A is a common allele that is present in S3.

[0324] The diploid K8 mapping population can therefore inherit the following combinations of alleles: AA, AB, AC, BC. Table 3 shows the mean trait values for each of these classes in the population for total fresh weight harvested, maximum stem diameter and maximum stem height. Analysis is based trait data collected at Long Ashton Research Station in 2003. The non-parametric rank-sum test of Kruskal-Wallis (KW) (Lehmann, 1975) was used to determine associations between marker genotypes and trait scores.

TABLE 3
Mean trait values associated with inheritance of particular QTL alleles (A, B
and C) in the K8 mapping population as determined by the application of a
microsatellite marker.

| | | microsatellite genotype | | | | | | |
|---|---|---|---|---|---|---|---|---|
| Trait | N^{o} | AA | AB | AC | BC | KW | df | Significance |
| Total fresh biomass | 902 | 1.30 | 1.90 | 1.75 | 2.17 | 132.76 | 3 | ******* |
| harvested per stool (kg) | | | | | | | | |
| Maximum stem | 849 | 16.30 | 20.12 | 19.22 | 21.37 | 186.37 | 3 | ******* |
| diameter per stool (cm) | | | | | | | | |
| Maximum stem height | 902 | 3.16 | 3.79 | 3.69 | 3.96 | 223.95 | 3 | ******* |
| per stool (m) | | | | | | | | |

N^{o}: Number of plants included in analysis
KW: Kruskal-Wallis test statistic
df: degrees of freedom
Significance: ******* = 0.0001

[0325] In this example, plants of genotype AA often give the lowest yield and plants of genotype BC often give rise to the highest yields. Where the goal of a breeding programme is to increase harvestable biomass yield, plants of genotype BC would be preferentially selected using the marker. Similarly, potential parents of genotype AA might be excluded from a crossing programme as this allele can be associated with lower yields.

### Example 3

[0326] Disruption of Xyld7 gene sequence in QTL haplotype A

[0327] An alignment of Gene Xyld7 allele A (SEQ ID NO 2) sequence with the Gene Xyld7 allele C sequence (SEQ ID NO 1) (as shown in the alignment of FIG. 9D) indicates Gene Xyld7 allele A has an insertion region with extra nucleotides that are not present in Gene Xyld7 allele C sequence SEQ ID NO 1. SEQ ID NO 26 (as shown in FIG. 9E) shows the amino acid sequence of the Salix Xyld7 allele C polypeptide.

[0328] A comparison of Xyld7 gene sequences for both alleles of plant R13 (alleles A and C) identified an insertion in Xyld7_A allele which is not present in the Xyld_C allele sequence. To determine whether the insertion is in coding sequence, the transcript of allele C of this gene was fully sequenced which confirmed that the insertion in allele A is within exon 3 of the gene. The resulting allele A transcript, if expressed, would not be expected to encode a functional protein. Indeed, while both allele B and C transcripts have been identified, no allele A derived transcript has yet been identified in plants S3 and R13 (the K8 parents which carry either the A and B alleles or the A and C alleles, respectively). It is therefore possible that allele A of this gene is non-functional in the K8 mapping population and this may contribute to the underlying phenotypic variation that is represented by the biomass yield QTL.

[0329] All publications mentioned in the above specification are herein incorporated by reference. Various modifications and variations of the described methods and system of the invention will be apparent to those skilled in the art without departing from the scope and spirit of the invention. Although the invention has been described in connection with specific preferred embodiments, it should be understood that the invention as claimed should not be unduly limited to such specific embodiments. Indeed, various modifications of the described modes for carrying out the invention which are apparent to those skilled in molecular biology or related fields are intended to be within the scope of the following claims.

1.-44. (canceled)

45. A method of selecting a crop by marker assisted selection of an allele associated with harvestable biomass yield, wherein said allele is an allele of a polynucleotide sequence, said polynucleotide sequence having at least 50, 55, 60, 65, 70, 75, 80, 85, 90, 95, 97, 98, 99 or 100% identity to SEQ ID NO 1, 2, 3, 4, 5, 6, 7, 8, 9, 10, 11, 12, 13, 14, 15, 16, 17, 18, 19, 20, 21, 22, 23, 24 or 25, said method comprising: determining the presence of one or more markers, which markers are genetically linked to said polynucleotide.

46. A method according to claim 45, wherein the crop plant is a monocotyledonous and dicotyledonous fodder crop plant, forage crop plant, ornamental crop plant, fruit crop plant, food crop plant, an algae, a forestry tree, a bioenergy crop plant or a biofuel crop plant, Acacia spp., Acer spp., Actinidia ssp., Agave spp., Agropyron spp., Agrostis spp., Allium spp., Alnus spp., Alopecurus spp., Amaranthus spp., Ananas spp., Apium spp., Arachis spp., Areca spp., Arundo spp., Arrhenatherum spp., Asparagus spp; Avena spp., Atriplex spp., Attalea spp., Beta spp., Betula spp., Brassica spp., Bromus spp., Bouteloua spp., Camelina spp., Camellia spp., Cannabis spp., Capsicum spp., Carica spp., Carex spp., Carthamus spp., Castanea spp., Carum spp., Cinnamomum spp., Citrus spp., Cocos spp., Coffea spp., Corchorus spp., Cotoneatser spp., Cucurbita spp., Cupressus spp., Cynodon spp., Daucus spp., Dactylis spp., Eucalyptus spp., Elaeis spp., Eleusine spp., Fagus spp., Festuca spp., Ficus spp., Fraxinus spp., Geranium spp., Ginkgo spp., Glycine spp., Gossypium spp., Helianthus spp., Hemerocallis spp., Heracleum spp., Hedysarum spp., Hibiscus spp., Hordeum spp., Indigo spp., Ipomoea spp., Lettuca spp., Jatropha spp., Lotus spp., Lactuca spp., Lathyrus spp., Lens spp., Linum spp., Lolium spp., Lupinus spp., Lezula spp., Lycopersicon spp., Malus spp., Manihot spp., Medicago spp., Melilotus spp., Mentha spp., Miscanthus spp., Musa spp., Nicotiana spp., Olea spp., Onobrychis spp., Ophiopogon spp., Oryza spp., Panicum spp., Papaver spp., Petunia spp., Phaseolus spp., Pennisetum spp., Phalaris spp., Phoenix spp., Phleum spp., Phyllostachys spp., Physalis spp., Panicum spp., Picea spp., Pinus spp., Pistacia spp., Pisum spp., Poa spp., Podocarpus spp., Pogmania spp., Populus spp., Prunus spp., Quercus spp., Ribes spp., Robinia spp., Rosa spp.,Raphanus spp., Rheum spp., Ricinus spp., Rubus spp., Salix spp., Sequoia spp., Sesamum spp., Setaria spp., Saccharum spp., Sambucus spp., Secale spp., Sinapis spp., Solanum spp., Sorghum spp., Trifolium spp., Triticum spp., Triticosecale spp., Trisetum spp., Tagetes spp., Theobroma spp., Triadica spp., Vicia spp., Vitis spp., Vigna spp., Viola spp., Watsonia spp. or Zea spp.

47. A method for predicting harvestable biomass yield according to claim 45, wherein the crop is a member of the genus Salix or Populus.

48. A method according to claim 45, wherein the marker is within an interval of less than 45, 40, 35, 30, 25, 20, 15, 10, 5, 4, 3, 2, 1 or 0 centimorgans (cM) from said polynucleotide.

49. A method for producing a transgenic crop plant of claim 53, comprising introducing into an unmodified crop plant an exogenous polynucleotide, wherein said polynucleotide comprises a nucleotide sequence having at least 50, 55, 60, 65, 70, 75, 80, 85, 90, 95, 97, 98, 99 or 100% identity to SEQ ID NO 1, 2, 3, 4, 5, 6, 7, 8, 9, 10, 11, 12, 13, 14, 15, 16, 17, 18, 19, 20, 21, 22, 23, 24 or 25 or the corresponding cDNA sequence.

50. A method for producing a transgenic crop plant of claim 54 that expresses a recombinant polypeptide comprising an amino acid sequence having at least 50, 55, 60, 65, 70, 75, 80, 85, 90, 95, 97, 98, 99 or 100% identity to SEQ ID NO 26, 27, 28, 29, 30, 31, 32, 33, 34, 35, 36, 37, 38 or 39, comprising introducing an exogenous polynucleotide comprising a cDNA encoding said recombinant polypeptide into an unmodified crop plant.

51. A method according to claim 50, wherein the exogenous polynucleotide is associated with a promoter sequence capable of directing constitutive expression of the protein encoded by the exogenous polynucleotide in the plant.

52. A method according to claim 50, wherein a primary transgenic plant is generated by introduction of the exogenous polynucleotide, and a secondary transgenic plant is produced from the primary transgenic plant.

53. A transgenic crop plant comprising an exogenous gene, wherein said gene comprises a sequence having at least 50, 55, 60, 65, 70, 75, 80, 85, 90, 95, 97, 98, 99 or 100% identity to SEQ ID NO 1, 2, 3, 4, 5, 6, 7, 8, 9, 10, 11, 12, 13, 14, 15, 16, 17, 18, 19, 20, 21, 22, 23, 24 or 25 or the corresponding cDNA sequence.

54. A transgenic crop plant expressing a recombinant polypeptide having at least 50, 55, 60, 65, 70, 75, 80, 85, 90, 95, 97, 98, 99 or 100% identity to SEQ ID NO 26, 27, 28, 29, 30, 31, 32, 33, 34, 35, 36, 37, 38 or 39.

55. A transgenic crop plant according to claim 54, wherein the exogenous gene is derived from a plant of the genus Salix or Populus.

56. A transgenic crop plant according to claim 54, wherein the exogenous polynucleotide is associated with a promoter sequence capable of directing constitutive expression of the protein encoded by the exogenous polynucleotide in the transgenic plant.

57. A transgenic crop plant according to claim 54, wherein the plant is a secondary or subsequent generation transgenic plant derived from propagation of a primary transgenic crop plant, the primary transgenic plant being generated by introduction of the exogenous polynucleotide into a wild type plant.

58. A transgenic crop plant according to claim 57, wherein the second or subsequent generation transgenic plant is homozygous for the exogenous polynucleotide.

59. A genetic construct comprising (a) a nucleotide sequence having at least 50, 55, 60, 65, 70, 75, 80, 85, 90, 95, 97, 98, 99 or 100% identity to SEQ ID NO 1, 2, 3, 4, 5, 6, 7, 8, 9, 10, 11, 12, 13, 14, 15, 16, 17, 18, 19, 20, 21, 22, 23, 24 or 25 or the corresponding cDNA sequence, and (b) a promoter sequence capable of directing expression of the protein encoded by the nucleotide sequence in a plant comprising the genetic construct.

60. A genetic construct comprising (a) a nucleotide sequence having at least 50, 55, 60, 65, 70, 75, 80, 85, 90, 95, 97, 98, 99 or 100% identity to a nucleotide sequence encoding the polypeptide of SEQ ID NO 26, 27, 28, 29, 30, 31, 32, 33, 34, 35, 36, 37, 38 or 39, and (b) a promoter sequence capable of directing expression of the protein encoded by the nucleotide sequence in a plant comprising the genetic construct.

61. A plant transformation vector comprising a genetic construct as defined in claim 60.

62. A plant or plant cell comprising a transformation vector as defined in claim 61.

The application's sequence listing, which the Patent Office published only in electronic form, follows.

SEQUENCE LISTING (77 sequences)

SEQ ID NO: 1 - DNA, 1282 bp, Salix sp.
atgggccacaggtgctgcaacaaacagaaagttagaagaggtctgtggtctcctgaagaagacgagaagcttgtcgaatacatcaccactcgcgatcatggaagctggagctctgtccctaaatctgcaggtatgcacgtgcgtgttgtttttgcttgcatcagagatcaaaatcaagccgtctgatctgtttttgacgcatcattgctctgtgcttgcaggtttgaaaaggtgcggtaagagttgccggttgaggtggctcaactacctgagaccagagctcaagaggggttccttttctgcgctggaagaacaggtcatcatagatgttcatagaattctgggcaacaggtaaggattattcgagtcaacttaaataaggaagtactgtataaaaaggtagaaaaaatgaaaaataaataaataaaacactgtttctaacaatggggaaagtagtctgattatatattttgtcactgcattttgatttacaagctagagctttatacttgtaattaacagatgggctcagatatcgaaacatctcccaggaaggacagataatgaggtgaagaatttctggaactcgcgcttgaagaaaaagctcatggcacaaggcttggacccgaaaactcacaacctgattcctactcgccagagggcagctaattataaggttgcatgcagcatatcaccatctaaccacgaacccttttcaattacctcccatgattcaaagatgaaagatgtttccttggagataaaccctcctgttctaacaatagtttcacctaattatccttctaattgcagcatccagcctccattctttcaaacaacaacgagcttgcccttgcccaaatcttgttacgataaccctagtgtcgtttggaatgtaaattctcaaaattcttatgattcatcccttttcacctgcgtgtcatccattgagaactcactcgcttcctcttcgtcctcgtcttcagcgaacccaactgggtttggtctcgtggatgaaaactgcttttggagttgtagtaacattgttgagccctttgaagccgcaaaaatattcgaaagtgtgccgccacaagatcaggaaaaccagctgaacaaggtttgtgacacccaaatcatgggtaagaataaaggagttcatgacaatatggaagcttcattcgacacctctagctatgatcttgggttggtcgactccacattatttcctggttcaatgtgtcatgatcttagctcaatggatgatcttgcatggaacttttag

SEQ ID NO: 2 - DNA, 4303 bp, Salix sp.
  misc_feature (3445)..(3451): n is a, c, g, or t
atgggccacaggtgctgcaacaaacagaaagttagaagagggctgtggtctcctgaagaagatgagaagcttgtcgaatacatcaccactcgcgatcatggaagctggagttctgtccctaaatctgcaggtatgcacgtgcgtgttgtttttgcttgcatcagagatcaaaatcaagccgtctgatctgtgcttgcaggtttgaaaaggtgcggtaagagttgccggttgaggtggctcaactacctgagaccagagctcaagaggggttccttttctgcgctggaagaacaggtcatcatagatgttcatagaattctgggcaacaggtaaggattattcgagtcaaattaaataaggaagtactgtataaaaaggtagaaaaaatgaaaaataaataaataaaacactgtttctaacaatggggaaagtagtctgattatatattttttcactgcattttgatttacaagctagaactttatactgcttctaacaggtgggctcagatattgtaagaattcgaacttcgattaatttcagtatatacaattgattgtttgttgctgttacatttggggaattatataggaaataattacaatacatttttagctaaaatacaatacatgtttaaactaccaaaaaatcaattatcctattatagtaataaacggctatatggacataacggctatatttcaacactccccctcaagttggagcatagatatttatcatgtccaacttgttaattgcaccatgaaatgctcttcctgaaactgcctttgtgagagtatcgccatttcactgcaatgagaacacaccaacccagttgcattttttattttcggtcaactcgaccagcctttaaatctcgtccccctccttcaaactgcgctaccttatcgaatgtaaaatttcctgatggtgatctccccctgattaacagggtgaatatcttcgatggtgatctccctctgattaacagggtgtggagtcacggaatattttcgggatggtgatctccccctgattaacagggtgtggagtcacgtaatatcttcgggattcactgaatatcttcgatggtgatctccccctgattaacagggagtggagtcacgggatatcttcgatggtgatctccccctgattaacagggtgtggagtcacgggatatctttgatggtgatctccccctgattaacagggtgtggagtcacggaatatcttcgggatggtgatctcctcctgattaacagggaatggagtcacgtaatatcttcgggattcacggaatatcttcgatggtgatctccccctgattaacagggtgtggagtcacagaatatcttcgatgaggatccccccctgattaacagggtgtggagtctcggaatatcttcgttctcttcattgttactctccccctgaagagaaggtccgggaactccccctgattaacagggtgtgtggagtctcggaatgattcattctcttcatcctgatggtgatctactgttagtctgatttcctcgtttaacactaccaataatctctcgggttagaatgtcctgaaaaaacacaaaagagaggccaaaaagtgacagtgcatgcaaggataaaagtaatttgacttactgacaagagattgtatacaagagatggaccaatgagaacaatatctatagttacataatcggtcaaggttatagacccttccctcgtaataagagagggtttcaagaaccttaaatttccggaatccctggtcatattatcagatgcgcctatatcaataattcaaaggattatttttaataatgacagagtttgcagaagttttaccaattgtgtctggatgaacaacattcatcgtagattgtacctgttcagttttcataaaatttactatacctttgccgatatttttccgggttttttcataaaatctcaccagtcaagtagtcaataatttcgtagcatctttgtttcgagtgacccgattcgccgcaataattaaataacaaccgtttcaagataacaaattcgagataaaaaaatacgtttcaagataaaaaatttgagattcgctcggatcaatatgattcaaagaaatacgatttaaaggaaaaaaaattgagattcgagataaaaaatacgtttcaagaaaaaaaattcgagattcgagatacaaaatacgtttcaagataaaaacgtcgagattcgagatacaaaatacgtttcaagataaaaaaaaaaaaattaagattcgagatacaaaatacgtttcaagataaaaaaaattcaagattcgagatacaaaataagtttcaagataaaaaatgcagaagttgtaggtgtaccattattgtttcgaatgacccgcttcaccgcaataaaaaacaaaccagcctacccgggttcttataaccggaattaaacctttgcctttcactttcatttctctcatctctgtgacccatctgtctctcacccggtttcttataacccgaagtaaacatctgcatctcacttttatttctctcatttccagccttgaactctgcctcatcacttctccacccgttcatttcgaccctttttctgttcaaattcgttgacgagctccgattctcaaatacgtttgcctgttcggcctttttttcttcagcggcagtttcagcttcagctttccttcgagcctcgtcagcagccttagctcctgcctgcacccgagcttttccttccttttgccttcttgctaattcctcaggatcacgcttttcacccttttcaatttccttttctcgagctttaagtatggtgtcagcaaaacggttcttcaacaaaggtgcacgatagagcttatcgggagagacttgcctctcaggtggagcactctcccctgtatcaatgcctgatgtgcaggttaccctttctggttgtttctggtttgtggtgtttgtgatgagaaatctgggtttgtggtgtttgtttctgtttttttttcgttttcttttgtgtgttgagaaatgaagggaggatgtctgtgtgtatgaattgatggaatttctgggtttgtggttttttttccggggaaaatgtggcttttcgggaaaatgtggcttttccgggaaaatctgggtttttctgggtttttactgtggggatcgatgggttatttttctgggttgtttgtgtatgaacagtgtttgatgaacaagcactgtgcagattgaggtctgggtttcgaaccagaagagagagaaaaaatgcagtaattcgatttcaaagaaaaattcgagatttgctctgataccatgtaagaattcgaacttcgattaatttcagtatatacaattgattgtttgttgctgttacatttggggaattatataggaaataattacaatacatttttagctaaaatacaatacannnnnnncatttttagctaaaatacaatacatgtttaaactaccaaaaaatcaattatcctattatagtaataaacggctatatggacataacggctatatttcaacagatatcgaaacatctcccaggaaggacagataacgaggtgaagaatttctggaactcgcgcttgaagaaaaagctcatggcacaaggcctggacccgaaaactcacaacttgattcctactcgccagagggcagctaataaggttgcatgcagcatgtcaccatctaaccacgaacccttttcaattacctcccatgattcaaagatgaaagatgtttccttggagataattaaacctcctaaaataacactagtttcacctaattatgcttctaattgcagcgcccagcctccattttttcaaacaacaacgagcttgcccttgcccaaatcttgttacgataaccctagtgtcatttggaatgcaaattctcaaaattcttatgattcatcccttttcacctgcgtgtcatccattgagaactcactcgcttcctcttcgtcctcgtcttcagcgaacccaactgggtttggtctcgtggatgaaaactgcttttggagttgtagtgacattgttgagccctttgaagccgcaaaaatattcgaaagtgtgccgccacaagatcaagaaaaccagctgaacaaggtttgtgacacccaaatcgtgggtaagaataaaggagttcatgacaatatggaagcttcattcgacacctctagctatgatcttgggttggtcgactccacattatttcctggttcattgtgtcatgatcttagctcaatggatgatcttgcatggaacttttag

SEQ ID NO: 3 - DNA, 1315 bp, Populus sp.
atgggccataggtgctgcagcaaacagagagttcaaagagggctgtggtctcctgaagaagatgagaagcttgtcaaatatatcgccactcatggtcatggaagctggagctctgtccctaaatttgcaggtataaatgtgtgtgtgtgtgtgttaatacccctttttttttgcatgcattagaactcaaaatcaagctatctgatccatttttgacgcatactttgctttgtacttgcaggtttaaaaaggtgtggcaagagttgccggttgagatggctgaactacttaagaccagaactcaagaggggttgcttttctgcgctagaagagcaggtcatcatagatgctcatagaattttgggcaacaggtaaggattaatatttgagtctaaataaggaagtgtataaaaaggtagaaattaaaataaataaataaaaacactgtttctaacaatggggacggtagatcactagatgacatgaatagagtagaagaattacttagcctatatattctttcactgcattttgattacaagaactttatacttgtaacagatggtctcagatatcaaaacatctcccaggaaggacagataatgaggtgaagaatttctggaactcacgcataaagaaaaagctcatggcacaaggcttggacccaaaaactcacaacttgattccttctcatcagagggcagctaataaggttgcatgcaatatatcaccatctaaccaacaacccctttcaattatctcccaggattcaaagatgaaagatgtttccatggagataaaccctcctattctaacactagcttccccttatcgttctcatggcagcactcgactttcgttgcttcaaacaacaaccggcttacccttgcccacctcttgctatgataaccctagtgtcatttggaatgtaaatactcaaaattcttatgattcttccctttttccttgcgtgtcatccattgagaactcacgcgtttccccttcatcttcgacttcggtgaacccaactgggtttggtctcctagatgaagattgcttttggagttgtagtaacattgttgagccctttgaagccacaaaattattcgaaggcatgcgatcacaggatcaagaaaaccagctgaacaagatttgtgacacacaaatcgttgataagaataaaggagttcatgataatatggatgcttcatttgacacctctagctatgatcttgagttggtcgactccacattatttcctggttcaatatgtcgtgatcttggctccatggatgatctttcatggaacttttag

SEQ ID NO: 4 - DNA, 4024 bp, Populus sp.
atgagtagccacacggcatcctccagtaatggaggcaacggatcgggtgattctggtgctccaagaaggaattcaaagcgacccaaatgtgattctcttctttacttctcgtttttttttttttttctattttgggcaaattcatgtctgccctcttgtgatcatggtgttagttgtgtttttaaattgcaaagttttgaaccctgtcctaattttcttgcttagtttgtttcagagactcaggtatttgaatgtttttgggatcactagtgggttttataggcatccatgtggaggtttatgcatatttttgatgggttcttgttattttgattcgctgttggttttgttgcatgagagtggtcgtgtgagctcttttttgattattttgtttcatattaagaatctaattttctttatattgatcatttagtctttccgtttttggaatagccttacctggtttttttaattcctcatcaagatatatttggaaattccccttttgaaagagaaatacggctattaaactttgttagcaataaaatgaactaaattgggtttgataaacaagatattaatgaaactcagctataacatgccatgagataattggacatttttccattacacgaataagaattttagtaattttggctgtattatcattacatgcatctaagtctaagcatgtatgctcatgtgatctacagtaagattgaaaacagaatgttttccagtgttcagaatagttgcctgactgcgtaattgttatcctgcaaagcaagatagatggatgaaaacattttaaatttatagggatgtattgtatttgccagagcaaaaaatctgcgatttttggtcattttattaaaatgcacttgtaatcttattgtagtgtagctgttaaaaaaaacaagaaaagtaaaaatagagagagcacagctgagcagcttctttatctgatgtttcaatcacagctcacaaattgtttttcactacacgagcacatatgggtaatgggtgtacatgtgatttttatggaactaaaaatgtttcgttttctttcagattcaaagtttactcaacaagaacttcctgcttgcaagccaattctcacaccacgatgggtaagtttttatcattctttttatctggtttcgtctgatgcaaatgagtgctcaaagttattaactcctaatatatctctttgtgcaggtagtgtctgcattcatgcttgttgccattgtcttcatccctatcggcattgcttgcttgcttggttcccgagatgtgagctctagtgtcacctaaatccttgcaattctagttatatttccacctatggttttttatgggttatcctccttttatcaggttgttgaagttgttaaacggtatgaaacagaatgcattccggttggaaatagaggcaatgaagtccaatttatacaaagcgctgctgataaaacatgcacaatatcaatgacggtaagtcctgttcttgcaattattatggttgatgtgttgttgtcattttctatgttctttattagcagtgtttgtggatttataagctaacaaggaaagacccatgccaatattattttctgttatacaatataccttcatgttattgttatctgttcactggtggcattccctttttgtcagagctgtaagtggtgctatatcagcagtgtattagtagccagtaggttactttatgctactccttacaaaaaacccatgccaatatctttttctcgcatgcaacatgacttatgctaattatagaaattagccatcatgacctgaggttaagcagtaaataacgatcttctgttctcaactcttgtttttcttgccagatccctaagcgtatgaagcaacctatttatgtttactatcagcttgacaacttctaccagaatcatcgtaggtatgtcatcaacttcatgtactctatcagcatataatttctgatgggttcaagtaatcatgtgtagatttttacataatggtcagaggtatattgttcatataaattgggagcattgatattcaggactatccaggcgcgtaatttatgtagatcataggtgatggtccagagaaccaattataacatgtggttcaggaagtgcacccttttagattttcctgccacattttataagtcaagatggcgatgtttgtgattttcaagaattacagacgttacagcctaggacctaggatgttgttacacgttgaggaaagggctcctctatgcatgcttaattggtggttaatatcatgtttctcatctcagaatagtgtgtttgactatttgttgatggtagaaaattacattctttcaagtgtttaataatgaaagcaacccatcattttataaaaactattgaacagtgtgaaactgtcatgattatcatgatcataaactgggatgcttactcactgaaagttgaagcacatgtaattgagtttatgtggtgattatttggcataattttaatgattgctctaataaatcaggtatgtgaagagccgaagtgatgaacagttgaaaagtgcgagtaaagagaatgatacaagttcttgtgagccagaagatactgcaacggggaggggggcaattgtaccctgtggtctgatagcttggagtttgtttaatgatacctatagcttctcccgcctgaaccagtcgttgacagtgaataagaagggaattgcttggaagagtgataaggagaaaaggtttggtaaagatgtctttcctaaaaactttcagggtggaggtcttgtaggtggtgcaaggctcgatccattaacacgtgtaagcctccctttactattacttcaaattaatatataagcaactcatcttatcactaactaaataactaattaaataactgttctaacttcatcctggaaaatacctttagaggctttaataatgttaataacactctggacattggtagatttcaaaactgcgttgctgttgtgttattagagtggtattttcaggttgcttaacctcaacttcaggattagtattgaagatgtgacctcagttattctttcattcatgaaggagttgattttttaaacccaaggtgttgagtattaggcttataccttggagacgtgagagacttggtgtaaatgcttaaaatgatgagatattgttgcgtgtcatttcccctcttctattgctaaaacgtgaaaatatactagagaaccataaatttttctccgtgtttctttctatgcaaattgcttcaagtaattggtatgtgactgacctggtcttatatgattttgtgtaacagctgagcgatcaggaggacctcatggtttggatgcgaactgcagctctgccaacttttagaaagttgtatgggaagatagaggtggatcttgatgcaaaagaagtcataaatgttacactgggtaacaactataacacatacagttttaatggcaagaagaaacttgtgctttcaactacaagctggattggtggaagaaatgactttcttggcattgcttatctcactgttgggatgatatgcttcgccttgtcaatgggtttcacaattgtgtattttgtcaagcctaggtaagttgatcatagatacaaattaattcttgaatttaggagcctagttctcgtgactttaataaactggttattaaagtcaaaatgcacgctgtcacaagtgtgcggcgtcacggcttttgaaagagtgaggctgttagaattgcccttcataaggcttgcattttatggtgaggatttggaagtgtgcccagcatcatatatggagtgaggctctgacttgtggagcatggccccatagtcggcagcataaaattttcatatgctatgtgtattcgattgtttgtgagatatatgttaatattttcttactgtttctctttactgtgtcatctcaggcggcttggtgatcctaccttcttatcatggaacagaggtcctggatcgcactaa

SEQ ID NO: 5 - DNA, 3789 bp, Salix sp.
atgagtagccacacggcatcgtccagtaatggaggcaacggatcgggtgattctggcgttccaaaaaggaattcaaagcgacccaaatgtgatctcttcttcactttttagttattttttgctattttaggcaaactcatgactgcccactcgtgattatgttgttagttttgttttaagttgctaagttttgaaccttgtcctaaatttcttgctagcctgttccatagactcaggttttttatttctttctgggatcactagtgggttttataggcatccacgcggaggtttatgtatattttttatgggttcctgtgattttgatttgctgttggttttgcatgagattggttgtgtgagctcttttctgactattttatttcataccaagcatctaatttgctctatattgatcatgaagtctttccgtttttggaatatccgtgcctttttttttattcctcaaaaaaatatatttggaaattccccctttgaaagagaaatatggctggctattaaactttgttggcaataaaatgaattaaattgggttcgataacaagatattaatgaaactcagtaattggacatttcccattacatgaatcggaatcttagtaattttggttgtattaacattacacacatccaagtccaagcatgaatgctcatgtgatctactttaagattgaaaacagaatgtttctagtgttcagaatagttgcctgtcagcgtaattgttatcctgcaaagcaacatagagggatagaaacattttaaatttatagggatgcattatattttccagagcaaaaaatctgcaattttttttcattttattaaaatacacttgtaatcttattgtaatgtagctgttaaaaacaacaagaacagtaaaaatagagagagcaccgctgagcagcttctttatctgatgtttcaattgcagctcccaaattgtctttttcaccacacaagcacatatggggtgtacgtgtgattttcaaggaactaaattgtttcgttttctttcagattcaaagtttactcaacaagaacttcctgcttgcaagccaattctcacaccacgatgggtaagtttttattattctttttaactggttttgtctgatgcaaatgagcacttagagttattaactccaaatatatctctttgtgcaggtggtgtctacattcatgcttattgccattgtcttcatccctatcggcattgcttgcttgattggttcccgagatgtgagcttgagtgtcacctaaatctttgcaatcctagctatattttcacctatggttgtttataggttattctccctttatcaggttgttgaagttgttgaacggtatgaaacaaaatgcattccggttctaaatagaaccaataaagtccaatttatacaaagcgacgctgataaaacatgcacaatatccatgacggtaagtcctgtccttgcaattattatggttgatgtgttgtcattttctatgttctttattagcagtgtttgtggatttataagataacaaggaaagacctattccagtattattttctgctatacaatataccttcattttattgttatctatcgactagtgacattgcctttttgtcagagctgcaagtggtgctgtatcagtagtgtattagtagccagtaggttactttatgctacttctgacaaaaaatctacaccagtatctttttctctcatacaacgtggcttcaatgctaatcatagaaattaactaccatgacccgaggctaaacagtgaataatgatcttccatcctgtattcttgtttttcttgccagatccctaagcgtatgaagcaacctatttatgtttactatcagcttgacaacttctaccagaatcatcgtaggtatgtcatcaacctcgtgtactctatcagcttgtaatttctgacgggttcaagtaatcatgtctagaatttacataatggttctaggtatattgttcatataatcatattgggggcattgatatccaggactatccaggtgtgtaatttacgtagatcataggcgacagcccagagaaccaattataaaatgtggttcaggaagtgcgcatgcttaattggtggtcaacattatgtttctcatctcagaatagtgtgtttgactattttttgatgctagaaaattactctctttcatgtgtttaataatgaaaagcaacccatcaatttataagatactaaaattagatcaaatcagaattgtcaaaactattgaacaggctgtgaaactgtcatgattaccatgatcataaactggacgcttactcactgaaagttgaagcacatgtaattaagtttatatgtggtgattatttggcttaatattaatgattgctcaaataaatcaggtatgtgaagagccgaagtgatgaacagttgaaaagtgcgagtaaagagaatgatacaagtgcttgtaagccagaagatattgcaaatggtaggggggcaattgtaccctgtggtctgatagcttggagtttgtttaatgatacttatagcttctcccgccagaaccagtcattgacagtgaataagaagggaattgcttggaagagtgataagcagaaaaggttcggtaaaaatgtctttcctaaaaactttcaggggggaggtcttgtaggtggtgcaactctcaatgaatcgataccagtaagccgccctcgactattactcatctggtcaaattaatatataagcaactcctctgatcacacactaaagaactgttcaacttcatcctgaaaaatacccttagaggctttaataatgttaataacactatggacatttggtatatttcaatactatgttgctgttgtgtttattagagttgtattttcaggttgctaacttcaacttcaggattattttaggtgtgacctcagttattctttcattcatgaaggagttgatttttattaaacccaaggtgttgagtattaggcttataaaatgatgggatattgttgcgtgtcatatcccctcttctaatgctaaaatgtgaaaatatactagagaaccatcaatttttctcactgtttcttttctattctatgcaaattacttcaagtaattggcacgtgactgacttggtcatatatgattttgtgtaacagctgaacgagcaggaggacctcatggtttggatgcgaactgcagctctgccaacttttagaaagttgtatgggaagatagaggtggatctcgaggaaaaagaagtcataaacgtgacactgatgaactactataacacatacagttttaatggcaagaagaaactcgtgctttcaacaacaagctggattggcggaagaaatgactttcttggcattgcttatctcactgttgggatgataagcttcgctttgtcaatgggtttcacaattgtgtatttcgtcaagcctaggtaagttgatcacagacacaaatttgaatttagggttcttgaaagagtgaggctgttagaaacttagaattgcccttcataaggcttgcattttataatgaggatttccaagtgtgcccagcatcagacttgtggagcatggtcccattagtcggcagcataagattttcatatgctgtgtattcgactatttgtgagatgctattaaatagataacttttgatattttctaaccttttctcttattgtaccatctcaggcgacttggtgaccctaccttcttatcatggaacagaggtcctggatcgcactaa

SEQ ID NO: 6 - DNA, 8390 bp, Populus sp.
atgacgttagggagaatagctctggcacgcatcccggcgactaggtgcaaaatacacagtctcttctctgctccacactcgtcttcttccacgaatcgcacctctcctccactatctcgccacgtaaccgctactcatcttcttttacttgcgcataagcatcaatagctttcatccttgtgttgctaattgaatacagcgatcgcgattttgaattatctaaattttgtttaattcatgttttaatcgcttagaaataagtagtattttagtaattactggttcaattgataaataatttgtttcattaatgttcaatgtaagtataatctctgtttgaatgtatttttgttttctggtattgttagttgcgaattcagctaggtttaaaatttgttaatgtttttatggcagatgagcatgaagagtgaaaatctggtttcgaagctaactagttctggtctattaaagacccagggtcttatcgatggaaaatgggttgatgcaaatgatggtgacactattaaggtctgccattattgtgcgtgtgtttgtttgtaattttgctctactgcggctactagttttgggtattgtttctttctttgtcacacaagacatcacatgtatgtgttcttttcatggaatgacaggttctcaatccggccacgggtgaagttgtagctattgtcccatgcatgggccagagcgagacgaataatgctatatcatctgcctatgatgcatttagatgtaagaaacttcacactgaaccaacctaacgttcagtaaaatgtatttatgctagttaaccttctcctactggcgctatcatttcctaagttttgaattttgttagaggaatatggtttattttgcatgcgaggattatctttcagtagtaatagggggaattgctagtagaggattggtcatggaagtgcagttattgctgtgctgtctttgtaggttagaatccatgctttcagaaggtaatggcacttggatgtctcttttacagtatgtcaaccttattactgaattggagagcatatatacgtttttttctgaactcatgtgacaccatcttggttattcctttcaaagagtttggatttcatgacaattgggtgaagtcttattttactacatcaatccactattattcttttcaattgacctgcaactcgcacctgctttatagcccgcaccacgtaactaactgctacaatacattaaatacttcaactcatactcaaacgcttgtggtatttatgataataatcactgtaaacatgcagtggtgcacactcttgaaatattacttccaagcttctatgtgttgcatttttattcctcttatcctagcttttcgcagcacaatttgttggtaatttactgtcctacagatcattattttagctgtctcttcgagagttatgtggtactctagaagcaaagagtgaatggaatggattaaatcgagtaccaatctagtttttatgacttacaagttgatatgcccttcaaagacttacatagacctttgcatagatacaatcttaataggatctactcatctgacttaaaatatggaaatctcttgttttttaccataagcttgctaaactcctcattgtttatatggatttttcttgtttagctgtaatactagcatattttgatggcccttttctgatatagcttgacattgttttttttttttttgatttatatcttttgctttactggacttcaaatgatattgaatttttttttaaaaattcttgctgatggttgcaacatgttcattgtcttttatttggccagcatggagtaaactcactgcttctgagaggagccaacgtatacgaaaatggtatttaacccttccaatacgatcttattaaattatctgtgttgtgaatgtaaatacttccaaattaatcaaatagttgaaaataactgtgttgtattggtagagtattatggttctctacactgaatctcatatgattctttccacctgtattgtaaggtatgacctactaattgctcacaaggaagagctgggacaattaataaccttggagcaagggaaacctctgaaagaggccatgggtgaggtatctcatctcaactttgctttcggaaattaagagataagcgttaaccctacattgtgttactggtcattgtcaagcaacatgtgatccaagtctctaataacaggttagctatggagctagttttattgagttctacgcagaggaggcgaaacgtgtatatggagatataattccagcgactcttggtgatcgtcggttatttgttctaaagcaggtggctataactgtttgtgatatatgaaatcctgtttaattgcaaatacgagtaaattagttcttccgacagcctggctactcctatagacctcgataatttgcccttggtttgggtctctttacaaggccttttcaaattgtgttttaatttctggcaccagcatgtatgtttaatgcaccaatatttgttaaaaccacataaaactcatgatttttaggaattaaaatcctcgggttcaatatctatgagaagaacagggcccgagatcttgggacacattccttgcatgaactgtgttttagtcaactttatcctggtagcggtccagaaatctgtttcttaatgatctatcttgatgaatagttcttgtcacaacttttcttctttgagctgtttgcatggctttgataatttcccagcgttgcttgtttctgtgcaatccatttattcagctatttatccagcaatcttcatgagtttttgcagcctgtaggtgttgttggggcaattacaccctggaactttccattggcaatgattactagaaaggtgtgttcattttagaatgattctgtgcaaagaaagttaaccttttctggtgcatgagtttgttgttgaagaataacatacttttttcctcacttgcataggttggtcctgctcttgcttgtggttgtacagttgttttaaaaccctctgaactcacacctctcacagctttagcagcagctgagttggcccttcaagctggaataccaccagtgagtctcaaactttttacgtgcacagtggaagtttcttaattatttaggccgtgtaagatgcaagtgcttggatataatgtggccttggttgtctttgtaaattgtgtcctgttagacattgatgataaagttgatactttatggttgtttcaatgagaaagacttatcctctgcgatgcaatgaagtttttggagtaagttttggttggaaactaggatacttgtaatgttttattatagtctcagcatccaaaaatattctattatctggttgtgcaagaagaagctgcagcaagctaacatttagaatatttactaaagagtgcttaaaaagtaaggagggatgggaatgtaacataataaaatccaagtatcatcccatgggtattagatgtttatcacaagattccaactaagcaaagtactgaagaaaaatgcccttgctgactgttaaattgagtgactttgtgttgcaggaacacctactgaagaaccacaattgacaaatagagtgaaatgctcttttgtattttatatctcatcatacctgtgttatgattgctaacctatgctaataatcagttgagcatccttaccgagcaatgaaacagaaaatacccatcactggcaatctttttagctccgttctggtttagcatgtccttgcatcaccggacaacagcaggatctggtctatcgtcctgatcaaactgctttctgctttgaatgacataatgatggaatgaatgaagctttttctggtctgcttttgtagatgcatgtcatacacaattgatgtgttatattagctaatatgagttcaaatttgttggaattctgttcatttgtttttaatggttttaatttcaatatttcagggtgttctgaatgtggttatggggaaagctcctgatattggtgatgctttactagcaagtcatgaggttttacacccttcctctatttccttaaaccaaccttctcttctctttgacaacatggcattgtcctggccagagtagttggatattcaaatgacataatgttgatattcttgctttatacatctgattcaggtaagaaaaatcactttcacaggatcaacagctgtgggaaagaagttgatggctggtgctgctggaacagttaaaagggtatgcattggatgcaaaatgaatcaatgtgatgatgtttcagaaatcatcttatggctaattgtcttttcccttaatctttctagttatctctggaacttggcggcaatgcaccctgcatagtatttgatgatgcagacctagatgtggcagttaaaggatcagtaagttagaggggttccctgtgcatgtttattttgattgtggtattgtcatggatatttctgagtgccatttaataatgtttactttacatgtttagacatatcagatggacacactaagcttcctatctgactggaatggattttggtgccgagggttgttaattgttggttagacatgggggtccatgtctccatttttggaagtgaaccttttgtgtgaattgcattggtgaagccatttgatttactgatttcaggacagcctattactgcagaggctttgattcaggattttgaaaatgtgcttttgttttgcattcattattgggaggtattgtcatggtggtggtaatcttatcaaatcatttcatatcattgcagcttgcagcgaagttccgtaatagtggacaaacatgtgtttgtgcaaacagaataattgtgcaagagggtatccaactacagaattacagccctgattttaccccttaattctaattttatatgtaatatgcagccattttgatttgtgatatattgcacctttatgtgcaggtatctacgacaaatttgcagattctttttcaaaagctgttcagagtatgcaagttggggatggctttagcgaaggtgtgacgcaggtaggggttgcatttttttttttaaaatatttcgtaattgttcccttgttgaataataatttgtgcaaagctagtcaggtattctatgtttcctagatttagcagtttctagggatgatagcatttcaatggttggtgacacatgctagactgctttatcatctttattgctccctatctcgttgagtttgtccaccttttcattttgagttgtcctaaaattattgccgactatgaaaagtcaaaattattaaccatttggtcttcttgctatatccttaattttactcattttattttatttttaattcaactactttctccctcgtaaaactagatttaaataaaactctttatttcttgagtttttcaaacacaattcttattaattgagggagtaaatatatcaatgaatttacaatgaaaaattgtcttaattgtactatttatttagattataatatgtgatttagcaagaaaataatgcccacacatgctaaaaaagttgtgattaatatacttaaaaaaattgttctttctttgtagtttcaaaccttgatcaactactttgcacattaaacctctcaccactagcccaaccaccttgatatgattggttctggaatataataaaagggtaatactagaaagtgatgaaggaatggataaacatgtcatcccattaattgttccttcttaatctttgtgaaagtcgaagggtactagactttgggtaatagggagtctgtaatttgtttggatgaagatattctaatcacacattcatgcagagatgtagtttgttgtgtttatacatctagaaccttttattagctactttcatgagatttgaagtgaacagatcatggtgataactattagtttcctcacagggtccattaattaatgaagctgcagtccagaaggttagttgcattttatacatacaattggccagccatcttgcttgtgataatcctttttaattaatgagatttgttgtcaattggtccctttgtgatttgggtttcaggttgaatcatttgttcaagatgccatctttaaggtttgccttttctgctttatcttattcaatgtactaggttgaataaaacttcatgcattatattgtctttacatcttccaatatttcctcttcctccccgcaatacactcgacctatgatagcattatatttttatgaccaagggagaaaacttttggaggttggagtaaacttttgtatgttttggtgaaacctagaagtatttgtaatattttcaacgccaaaaaattctataatgcaattaggttacttcgacattctgtttctttgttccctcgcacttcattatatgaaaagctgaagccaaataatagacttggttacagtaattaagtttcactggcataattgttcttcaattatttgttctgtatatatctcatttctaattaaccaaaattgtacttgaagggagcaaaagtcctccttgggggaaaaaggcatagccttggaatgaatttctatgaaccaaccataattagcaatgtcactgaagcaatgcttctatcgaggtaaatacatgaagataatttattcattctgcaattctcagctgtataattaaagatgtccatcagctttcttacaacaggtaaaaggatagtggctgttgttctctgccacttgctgatgggtatacattcttaccttcagtgcggctggttgaaacatgcagccatgctaaaaactaacaggccaacctttaggttttggcatctaatcatggacactcatggtggttttgttttttagctctttcttaaccatggcatgtaaaattcaattgcaaacttaaggttaatgttcttagacaaaccaaaattgaggtcttgtttattgatcggggactaatccaggttcgcagtagatgacaaaattgaaggctccttaggaaatgttgcatccacaaatactgccttttaatcaaatgaagttgaaggactggccattgctttcagttcttttatgtgattttggagttggtacttcataattaacttgctgcaaattcattttcaaattatagaactttcttattaatcagagcttagctcgaagagttaatggatatgtgtaggtttataatggagcacggtgtggtttgcattttcatttttgctctttgaagtattttggtttgcacattgttgatatcagtagcgttagcttttggtttgttaaatgcggcatcattgatttgtttacattaacataattttaatccatgtcattgaagttccttaacattacctataggtttatactcattcaggatgttaatatgctctcctctgccttgtttcagggaggaagtatttggcccagtggcacctctgttgcggttcaaaactgaggaagaagccatcttgatggctaataacacaaaagcaggttctttcgtctgcctttacatgcatacatgtacacgtatttatctttttgtttcctcattgctatcattttaaatatcaattatctgagagtattacagatgaaagtttgtaatatactccttaacccagtttcattttccatactattgtctttatctattgtcatggtaaacagacttatggtcaactgtaatacaggattctagcttatcttttctggtaaacgatgcagggttagctgcatatattttcacaaacaatgttcaacgttcatggcgtgtcactgaagctcttgagtatggacttgttggtgtcaatgaaggacttatttcaacagaggtgggacttatcctgtgttccccattggaaaccatagattggcttcttaaaacttaaaaaatgtctgttgctaaacaggtagctccatttggaggagttaaacaatctggtcttggacgggaaggctccaagtatggaatggatgaatatctggaggtaaagattacttttaatgcatcttaggaaaaagtgaaagctatcttctctccctctcgctcccatgtttaagaacacaaattgggtattctaatcttctagcttgcttttaggactgcattgtttatcaacttaatcacacacatacagatctacatttctttattctttctatttgagggttttcaacctgtatttatgtgtgagggagatgatttactaattaccctggttttcaattccctaaggatcaagttcttggtttattttgcacctcttttagacctttactatcatcataacgaggtattcttgcatgccgtgcagatgaaatatgtctgcttaggcgatatgaacagaaaatga

SEQ ID NO: 7 - DNA, 8023 bp, Salix sp.
atgacgttagggagaatagctctggcacgcatcccggcgaccaggggcacaatacacagactcttctctacaacactttcgtcttcttccaagaatcgcacctctcctccactctctcgccacgtaactactactcgtcgtcttttactaacgcataagcatcaatagctttcatctttgtcttgctaattgaatacagcgatcgcgcttttgaatttatttacatcttgtttaattcatgttttaatcgctttgaaataagtagcatttcagcaaatactggttcaattgacaaataatttgtttcattaatgtaagtataatttctgtttgattttttttctgtcattgttagttgcgaattttattaatgttttcatggcagatgagcatgaagagtgacaacctggtttcaaagctaactagctctggtctattaaagacccagggtcttatcgatggaaaatgggtcgatgcacatgatggtgacactattaaggtctgccattattgtgcgtgtatttgtttgtgtttttctctactgcggctactagttttgggcattgtttctttctgccacccatcacatgacatgtatatgttcctttcatgggacggcaggttctcaatccggccacgggtgaagttgtagctaatgtcccatgcatgggtcagagcgagacgaatgatgctatatcatctgcctatgatgcatttagatgtaagaaacttcatactgaaccaaccgttcagttcagtaaaatgtattactgcatttatgctattcacatcaataaagtaattaattaaccttctcctactggcgctatcattccctatgttttgaattttgtaagaggaatatggtttattttgcatgcgtggactatctttcagtactggcagggggaatttctagtagaggattggttatggaagtgcagttattgatgtgttgtctttgtaggttagcatccatgccttcagaaggtaatgacacttggatgtctcctttacagtatgccaacctcattactgaatcgtagagcatacatatgtttttcactgaacttacgtgcatcatcttggttattcctttaaaagaatctgggttttatgacaattgggtgaagtattattaccacactaatccactattattgttctcaatcaacctgcaattcgtacagcctgcaccacatgactatttgctacaatatattaaataccacaactcacacacaaaagcttgtggtgtttgtgataataatcaccgtaaacatggcagtgatgcacactcttgaaattctactttcaagcttctatgtgttgcatctttattcctcttatcctagcttttcgcagcacaatttgttggtgttttactgcctttcagctccctatcttagttgtctctttgagagttatgtgatactctagaagcaaagagtgaatgaaatggtttaaattgagtagttcttacgacttactagttgatatacccttcaaagtattacatagacctttgcgtagatataatcttaataggatctactcatatgacttagatatggaaacctcttgttttttaccataagcttgctaaactcctcattgtttatacgcttttttcctgctcagctataatactagcatattttgatgcaccttttctgatatagcttgacattttttttttgtttcttttgctttactggacttcaaatgatattgaaatttgaaaaaaacttcttgctgatgatcgcaacatgttcattgttttttatttgtccagcatggagtaaacttactgcttctgagaggagccaacgtttacgaaaatggtatttgattcttccataatgattttattaaattacatgtgttgtaaatgtaaatacttccaaattaatcaaatagttggaaataactgtgttgtatcggtacagtattatggttctctaccctttactgaatctcatatgatttccccctattgtaaggtatgacctactaatttcccacaaggaagagctaggacaattaataaccttggagcaagggaaacctctgaaagaggccatgggtgaggtatctcatctgaactttgctttcagaaatcaggagataagcgttaaccctacatcttgtaactggtcattgtcaagcaacatgtgatccaagactccactaacaggttatttatggagctagttttatcgagttctacgcagaggaggcgaaacgtgtatatggagatataattccatcgactcttggtgatcgtcggttatttgttctaaagcaggtgactataactgtttgtgatatttgaaatcttgtttaattgcagatatgagtaaattagttcttccgacagcctggctactcatatagatgtcgacaatttcgccttggtttgagtctcttaaacaaggccttttcaaattgagttttaatttctggcaccagcatgcatgtttaatgcaccgatatttgttaaaactacataaaactcgtgattgggacacattccttacatgaattgtgcttcagtctactttatcctgtgagcagtccagaaatgtatttctcaatgatctatcgtgatgaatagttcttgccacaacttttcttctgtgagctgtttacatggctttgataattttcagtgctgcttgtttctgtgcaatccatttatccagcaatctcatgagtttttccagcctgtaggtgttgttggggcaatcacaccctggaactttcctttggcaatgattactagaaaggtgtgttcattgtaggatgattttgtgcaaagagagtttacttttctggtgcatgagttttctgttgaagaataacatactttttcctcacttgcataggttggtcctgctcttgcttgtggttgtacagttattgtaaaaccctctgaactcacacctctcacagctttagcagcggctgagctggcccttcaagctggaataccaccggtgagtctcaaactttttatgtgcactgtggaagtttcttaatttcctaggctgtgtaagatgcaagtgcttggatataatgtggccttggtcatctatgtaaattgtgtcttgctagacattgaagataaagttgatactttatggtttcaatgataaagacttatcctttgtgacacaatgaagtttttggagcaagttttggttggaaactaggatacttgtaatgtaggattttagtcttagcatccaaaaatattctattatctggttgtgcaagaagaagctgcagcaagttaacaattagaaatatttactaaagagcttaaaaagtaaggagggatgataatgtaacaaaatgaatctaagcatcatcccatggttattagatgtttatcacaagattccaactaagcaaagcactgaagaaaaatgctcttgctgactgttaaattgagtgactttgtgttgcatgcacaccttctattgaagaaccataattgacaaatcaagtgaaatgctcagttgtatttatatcacatcataatgattgctgacctatgctaatagtcagctgagcatccttactgagcattgaaacagagaatatccatcactggcagtcgtttttgctccatattctggtttagcatgtccttgcatcacaggacaacagcaggatctggtctatcatcctgatcaaactgcattctgcttcgaatgagataatgatggaatgaatgtagccttttctggcctttttagatgcatgtcatacacaattgatgtgttatattagcgaatatgagttcaaatttgttgaaattctgttcatttgtttttaatggttttaattttcaatatttcagggtgttctgaatgtggttatggggaaagcttctgatattggtgatgctttactagcaagtcctgaggtttcatatccttcctctatttccttaaacttttcttctctttgacaacatggcattgtcttggacagagtaaatggatattcaatgacataatgttgatactcttgctttatacatctgattcaggtaagaaaaatcactttcacaggatcaacagctgtgggaaagaagttgatggctggtgctgctggaacagttaaaagggtatgcatagcatgcaaaatgaatcaatgtgatgatgtttcagaaactatcttatggctaactgtcttttcccttaatctttgtagctgtctctggaacttggtggcaacgcaccctgcatagtatttgatgatgcagacctagatgtggcagttaaaggatcagtaagttagaggggttcccagtgcatgcttatattgatagtggtatcgacgtggatatttctgagtgccatttaatattgtttacttttcatgtttagacatatcagatggacacacactaaacctctgatctgactaggatggatattggtgcagtgggttgttaattgttggttagacatgggggtccatgcctccatatttggaagtgtaaccttttgtgttgattacattggtgaagccatttaatttactgatttcaggacagcctataagaggctttgattcaggattttgagaatgtgtccttccttcatgatatagctctttgttttgcatccaatattgggtggtcttgtcatggtggtaatcttatcaaatcattttatatcattgcagcttgcagcaaagttccgtaatagtggacaaacatgtgtttgtgcaaacagaataattgtgcaagagggtatccaactacagaattacagccctgatttaccccttaattcgaattctatatgtaatatgcagcattatgatttctgatgtgttgcgcctttatgtgcaggtatctatgacaaatttgcagatgctttttcaaaagctgttcagagtatgcaagttggggatggctttagtgaaggtgtgatgcaggtatgggtagcattttcctctttaaaatatttcgtaattgttcccttattgaataataatttgtgcaaagctagtcagttactctatgtttcctagatttagcagtctctaaggatgatgacattcagtggttggtgacgcaagctaggctgctttatcatctttatcacttcctgtttcaaagagtttgcccaccttccctttttgagctgtcctaaaactattgctgactatgaaaagccgaaattatcaacaacttgatcttcttgctatatgatgagggtcacatcactatatccttaatttaactcattttattttatttttagttcaactactttctcccttgtaaaattagatttaaacgaaacccttcatttattgagtttttcaaacataattcatattaattgaggagtaaatatatcaatgaatttcaatgaaaaattgtcttaattatactatttattttgctagaaattatgcctacacatggtagaaaagttgtggttaacatgtctcataaaaaaaatgttctttctttgtagtttcaaaccttgatcaactactttgtatatcaaacctctcaccattccttcataaccaccttgatatgattggttttgaaatataataaaggctaatactggaaagttatgaaggaatggatgacatgccatccaattaaatgttctttcataatctttgtgaaaagtggaagggtactaaactttgggtaagagggagtatgtaatttgtttggatgaagatattctgcttacacattcacgcagagatgtagtgtgttgtgtttatacatctagaacctttttattagctactttcatgagatttgaagtgaacagatcatggtgataactattagtttcctcacagggtccattaattaatgaagctgcagtccagaaggttagttgcattttatacatactattggccaccatcttgcttgtgttaatccttgtttattagtgagatttgatgtcatttggtccctttgtgatttgggtttcaggttgaatcatttgttgaagatgccatctttaaggtttgccttttctgctttaccttgttcaatgtactaggttgaataaactccacgcattatattgtctttaaatctttcaatatttcctcttcctccccacaataccctcgacctatgatagcattatatttttatgaccaagggagaatttttgtaggctgtggtaaacattttttatgttttggtgaaacctagaagtatttgaaatattttcaacgctcaaaaactctataatgcaattaggctaccttgacattctgtttcttttttatatatttctcatttctaattaaccaaaattgtacttgaagggagcaaaagtcctccttgggggaaaaaggcatagccttggaatgactttctatgaaccaactgtaattagcgatgtcaccgaagcaatgcttctttcgaggtaaatacatgaagttaatatattgatcctgcaagtctcagctgaataattaaagctgtccttcagctttcatacgacaggtaaaaggatagtggtggttgttctctgccacttgctgatgggtatacattcttaccttcagtgcagctggttgaaacatgcagccatactaaaaactaatagtccaacctttaggttttggcatctaatcatggacactcatggtggtttgttttttttactctttcttaatcatggcatgtaaagttcaattgcaaatttaaggtgaatgagtttagacaaaccaaacttgaggtattggtttctgattggggactaatccaggtttgcagtagatgacacaattgaaggctcattagaaatgttacatacaaaaacactgctgtttatcaaatgaagttgaggggctggtcattcctatcagttctttttatggggttttggagctggtatttcataattaacttgcacgggttcattgtcaaattatagaaccttattaatcagagcttagctcgaagagttaatgaatatgtataggtttataatggagcacgctgtggtttgcattttctttttcgctctctgaagtgttttggtttgcacagtgttgacatcagtagcattagcttttgttttgacaaatgtgacatcatttatttgcttacattaacataactctaatccatttcaaggaagttcctgaacattatctatacggtttgtactcattcaagatgttaatatgctctcctctgccttgctacagggaggaagtatttggcccagtggcacctctgttgcggttcaaaactgaggaagaagctatcttgatggctaataacacaaaagcaggttctttcatctgcctttcatgcatacattcccacatatttatcttttttgtttcctcattactatcatttaacttgcatttaacaaatatattgattatctgagagtattacagatgaagtatgcaatgtactccttaacccagtttcgttactattgtctgtctgttgtcttggtaaacagactgatggtcaattgtaataacaggattctagctcatcttttccggtaaacaatgcagggttagctgcatatatcttcacaaacaatgttcagcgttcatggcgtgtcactgaagctcttgagtatggacttgttggtgtcaatgaaggactaatttcaacagaggtgggactcatcctgtgatccccattggaaaccatagattggcttcttaaaacttacaaaatgtctgttgcaaaacaggtagctccatttggaggacttaagcaatctggtcttggacgggaaggctccaagtatggaatggatgaatatttggaggtaaagtaagattacttttaatgcatcttaggaacccccgttttttagggttttcaacctgtgtttatgtgcgcgagagatgatctacttgttatacccctggtttccaattccctaaagatcacctcttttactgccataacgaggtactcttgcatgccgtgcagatgaaatatgtctgcttaggcgacatgaacagaaaatga

SEQ ID NO: 8 - DNA, 1934 bp, Populus sp.
atgttccataccaagaaaccctcaactatgaattcccatgatagacccatgtgtgttcaaggggactctggtcttgtcctcaccacagaccccaagccccgtctccgctggactgttgagctccatgaacgctttgtggatgccgttactcagcttggaggcccagatagtacttaatctctctttgactagctagtctttagttctatttttatgtacgttcctaatttgtttgtgctgataacttcttcaatctctctaatacgtgttctattgccccccctctctatgcttgatcaaaaaatttgcagaggccactcccaaaaccatcatgagagtcatgggtgtgaagggtcttaccctttaccacctcaaaagccatcttcaggtttgaatagaacattctttcatgcctcttttgcttttgtattgacacctttgcggcattttcgatgtagggttggcttgatttcattcattcttttccttctatctttaattttcatttctttaacgtttcttttctcttaatttagaaattcagacttggaaagcaaccacacaaggatttcaatgatcattcaattaaggatggtaagagagctaattaagccatctttatatacagggtttttatttttatttttatttttatcctttcggttgttaaaggtggcaaggaaagactcggattcgactcctttccttccttttgctttacacagagagtgctaaaattaatctaaatgcttacctgttcttttttaattttccttgctttgattcttatacatgcacaatgtgatcaaaatgatcagattaattttttcataattttccatggcaagcagcttcggcgttagatcttcaacgaagtgcagcatcttcatctggcatgatgagccgcagtatgaatgagtaagtattacattcaaaaatacctctctcttaaaccaaacaattacgaacaagcagagttcatgcaattttcattttcttctaaggataacaataacgatataaacaaaatcgcttaagtttctttctttcatttctgtggaatatatgtgtgaaactgtacatagcagtaactcacacatgattgatgcgattaggatgcaaatggaggtgcagagaagactgcatgaacaattagaggtaagcacagatcgattgttcctcaacatctactccaccccttttttttatatataaactatttccttaataaagacagtccgtgtagactttatttgatgcatataaattaattccaggttcaaagacaccttcaattaaggaccgaggctcaagggaaatatatacaaagtttgttggagaaagcttgccaaaccctagcaggtgatcaaaacttggcttctggaagctataagggaatggggaatcaaggaattcctggtatgggtgcaatgaaagaatttggcacgctgaattttccagcatttcaagaccttaacatttatgggggtgaccaacttgaccttcaacacaatatggataggccatcactcgatggtttcatgccgaacaacgacaacatttgtttgggaaagaagaggcctagtccttacgatggtagtggaaagagccctttgatttggccggacgatctgcgtttgcaggatttgggatcaggaccggcatgtcttgaaccccaagatgatcctttcaaaggtgatcaaatccagatggcaccaccatcaatggataggggtactgatctggattccatatctgacatgtatgaaataaagccagcgcttcagggtgatgcactggatgagaagaaatttgaagcatcagcaaagctaaaaaggccatccccaagaagatcaccactagcagccgaaaggatgagccctatgatcaatactggcgccatgccacaaggcagaaactcaccatttggttga

SEQ ID NO: 9 - DNA, 1952 bp, Salix sp.
atgttccataccaagaaaccctcaactatgaattcccatgatagacccatgtgtgttcaaggggactctggtcttgtcctcaccacagaccctaagccccgtctccgctggactgttgagctccatgaacgcttcgttgatgctgttgctcagcttggaggcccagatagtactgaatctcgatctctttgactagctcgatagtctttagttatatttctatgtacgttcctaatttgtttgtgttgatcacttgttcaaatctctaatacgtgttctattgcactgcccccctccccccgcttgatcaaaaaaatttgcagaggccactcccaaaaccatcatgagagtcatgggtgtgaagggtcttacgctttaccacctcaaaagccatcttcaggtttgaatagaacattctttcatccatcttttgcttttctgctgacacctttgcgacattttcgatgtagggctggcttgatttcattcattcttttccttctatatttaattttgcatttctttaacgtttcttttcttttaatttagaaattcagactcggaaagcagccacacaaagatttcaatgatcattcaattaaggatggtaagagagctaagccatctttatatccagggtttttgtttttgtttttgtttttgtttttatccttacggttgttaaaggtggcaaggaaagactcggattcgactccattcctttctttttctgtacacagagagtgctaaaattaatctaaatgcctacctgttctgttttctttttccttgatttgattcttatacatgcacaatgtgatcaaatgatcagatgatttttttcataattttccatggcaagcaggttcggcgttagatcttcaacgaagttctgcatcttcatctggcatgatgagccgcagtatgaatgagtaagtgttgcattcaaaaatatttctttcttaaaccaaacaattacgaattgaacaagcagaagtcatgcaattttcattttcttaattttaaggacaacaatgatgatatataaaaatctcttaagtttctccttttcatttctgtggaatatatgtgtgaaactgtatatagcagtaactcacacatgattgatacgattaggatgcaaatggaggtgcagagaagactgcatgagcaattggaggtaaaacacagatcgattgtttctcaacatctactccaccccattttttttttataatttatttccttaataaagacagtcggtatagactctttttttatgcacatatataaattaattccaggttcaaagacaccttcaattaaggactgaggctcaagggaaatatatacaaagtttgttggagaaagcttgtcaaaccctagcaggtgatcaaaacttggcttcggtaagctataagggaatggggaatcatggaatttctgatatgggtggaatgaaagaatttggcacactgaatttcccagcatttcaagaccttaacatttatgggggtgaccaacttgaccttcaacacaatatggacaggccatcacttgatcatggtttcatgccgaacaacgacaacatttgtttgggaaagaagaggcctagtccttacggtggcagtggcaagagccctttgatttggtcggacgatctgcgtttgcaagatctgggatcggcaccggcgtgtctcgaacctcatgatgatcctttcaaaggtgatcagatccagatggcaccgccatcaatggataggggtactgatctggattccatgtctgacatttatgaaataaagccatcgcatcaaggtgatgcactggatgagaagaaattcgaagcatccgcgaagctaaaaaggccatccccaagaagagccgaaaggatgagccctatgatcaatactggtggcatgccacaaggcagaaactcaccatttggttga

SEQ ID NO: 10 - DNA, 2787 bp, Populus sp.
atgggctcaagagcaagaaggaagcaaagatggagcacacaaaccttaactccgctgctagaaggtcctgaccccgacatgcaagaagaaggtaacaaaaaggaaagctcatgggaagtaattcgtgaatggtttcgattgcaaaagggtcttccagcaggtaacagtttttcagtatcgttacatgggagtattccagtcaaaggacaagatttaaggcttttacttggagttttgggctgccctctagctccaatccctctagttaacgaccccattcatcgcattcacattaaaaacactcctattgtaagttcttctacactacttatccatatgtttattttcttaattcggcaactccatcttatcaattttttctataggaaaattctgccgcgcattatatcatccaacaatatttggcagcaacagggtgtttaaagcaacaaaaatgtatgaaaaacatgtattcaacagggagtgtgaagatgattcgttgcgagacagaaatttcctcgggaaaaaacgtgaagagcttggggactagaagtggcgaaaatgggtgctttgttctttggcaaatgttgccggggatgtggtctcttgaattggttgttggggaaaataaggtcatagcaggcagcgatgggaagaccgtgtggcgtcacactccttggcttggcactcatgctgccaagggaccccaacgccctctacgtcgcataatccaggtacaaactatatatatagtgcatcaaattcaatattaatcttgatgaaattgcccccttaaaaattgaagaccatagttttagttaatcataaagaaacattagccagaaaactagtgatctaaaactggtagtgcaatatcgggctatgagggagaagaaacaacagggtgaactgaggaatatttctgtttttctctaggttgaagacgataagacaaaattaggaacattgctttttactctacaatttacttttaatctactttaatcgaatttacataccagacataaggatggggatggaagaccaatacaagtttttttcttttaaaaaaaatagaatttgaagacctatctatatgtatagatcacaatcccgagaaatggtaggatctatgtacaagtagctgacatgatagggaaactgtcttgagctttaccagacagactagcttctttttttgaactctcacgttattcagagttaggaatggcacgtgattttgtttttgacgtcatctttgatcatgttcaaagtatatttttgggactgcagcttgtaatcatcctttgcactttacttttccttttttgcactttagtgaataacacctgatttattgcattatcgccccttgcttttcttgccttcccccccctcttctttgtttattttcttctcgttcccatgtcaatcgttttccttctctcctttctccaattttctgttttttttttttcgttttcgaaattatggcgagtttcaaagttagaaactatcgtggcatacttgaaaattgaaatcccagtacctcgtccggggttccttcctttgcctctagccccaagtgagtcaagtgacggagggatgaacattcctttggagtttttgggccaagccccgtttcccacaaaaaaccagggaattagtcataacttgtggaggaacatttatgcttaggtttctttttttttttttcaggagtggcatccccattttgtatatgtttcctttgcttgccatgacatgagaggaatcactggcctgcagctgttgagattttgtgcaccttgaataaaaaacatatgattctacttcctttattttcgtgtattattgaaattattaggatgtcaaagctgagctagaatatgtgtggaagtaccaaaatatttggacctccctcgtcatcatatccttgttcttttactaattaataattcgaggcttagatcagctatcctccattctcagacgaaaagatagggatcagtgtctaacagtatttcattgaattctttgaaatttatgaatttaatttgtggttctttcatttgatttcaggtgtcttgtcatgcttccttagttttatatatatatatatatatatatatatatatatatatatatatatatatatataagctcaaacctgaaacctcttaaattacaagttattagtaccctgtcctgcatctaattatgtgctcgaacactaatatcacctaaaacttagaccttttcttcgtgcacttaattaatcatgtggtggtattccagggcctggatccaaagagtacagccagcttatttgctaaagcacaatgcttaggggagaaaagaattggcgaggatgattgcttcgttttaaaagtagctgctgatcgagaagctgtaatggaaagaagtgaagggccagctgaggtgcttaggcatgtactgtatggctatttttgccaaaaaagtggcctcttaatgtatttggaggactcccatctaacaagggtacaaactccagaaaatgaaactatctattgggagactactataggaagtagtattggcgactatagagatgtggatggtgtgttaattgctcatcaaggaaggtcaattgctacagtttttcgattcgaggaagtgtcagtgcaacacagtaggactagaatggaagaagtatggaggatcgatgatgtcgtgttcaatgtgccagggctttccatggattatttcatccctcctgctgatatctatgatgcttctccatga

SEQ ID NO: 11 - DNA, 2768 bp, Salix sp.
atgggctcgagagctagaaggaagcagcgatggtgcgcacaaaccctaactccacttctggaaggtcccgaccccgacatgcaagaagaaggtaacaaaaaggaaagttcatgggaggtgattcgtgaatggtttcggttgcaaaagggtctttcagcaggaaacaatttctcagtaccgttatacgggagtattccggtcaaaagacaggatttaaggcttttacttggagttctgggctgccctctagctccaatccctctggttaacgaccccatccatcgcattcacattaaaaacacccctattgtaagttcttctacactccttaattatcattttgttttttgttttcaattcggcagctccattttatcagatttttttacaggaaaattccgccgcgcattatatcatacagcagtatttggcagcaacagggtgtttaaagcaacagaaatgtatgaaaaacatgtactcaacaggaagtgtgaagatgattcgttgcgagacagaaatctcctcgggaaaaaatgtgaagagcttggggactagaagtggcgaaaacgggtgctttgttctttggcaaatgttgccggggatgtggtctcttgaattggttgtcggagaaaataaagtcatagcaggcagcgacgggaagactgtgtggcgtcacactccttggctcggcactcatgctgccaagggaccccaacgccctctacgtcgcataatccaggtacgaactgataaatattttgtttttctcctggttgaagatgataagacaagatcaggaacattgttttttactctgcaatatatttttaatctactttaatcgaatttacataccggatataaggatagagatggaagaacaaaataagttttctttaaagaaaatttaaaaaattgaagacctgtaaatcacaatcccgagaaatggtaggatctatgtacaagcagctgacatgatagggaaactgtcccgagctttaccagacagattaccttctttttttgaacactcgcattattgacagggttaggaatggcacgtgattttgtttttgacgtcatctttgatcgtgttcaaagcatatacacgtatattttttgggactgcagcttgtaatcatcactttgcgctttacttttccttttttgacactttagttaataaaaacctgatttattgcattatcgcccctgcttttcttgcctccccccccccctcttcctcttgtttactttctaccgttcccacgtcaatttccgtctctcttttctccttttttttttttttggaataatggtgagcctcaaagttagagactatcgtggcattcttgaaaattgaaatcccaatatctcgtccggggctacttcctttgcctctagccccaagtgacggagggaggaacattcctttggagttttgggccaaaccctatttcgtaccaaaaaaactagggattagtcatgactcgtggaagaacaattatggtttttttttttaattattattattaaaatctagggaatttgtatatgtttcctttgtttgccatgacatgagaggaatcactagcctccagttgttgacattatttgtctcatcgagagttccattgaaattatttttaaaaatattttttgcttaaaaatatattaaaaaaatatttttatttttaaaaaattatttttaacattagtacatgaaaatgatctaaaaaataaaaaaaaaattaatttcaagtaaaataaaaataaaataaaaatcatttttttcaaaaatgtttttaaaatacagtgttaaacacccctatgtccacgaaagcatattactgtgtacctcctttattttggtgtattatattgaaattgcaaggttataatgtcaaagctgaggtagaacatgtatagaagcaccaaaatatttgtagctccctcctcatcatgcccttgttcttgtactaattagtaattcgagacttaaatcatctatcctccaatctcaaacgaaaagataaggatcgatgtagcttacaatatttcattgatttctttgaaatttatgaattatatttgtggttctttcatttgatttcaggtatcttgccatgcttccttagttttttttttatcatagctcaaacatgaaacctcttaaattataagttattagtaccaccctgtcctgcatctaaatatcatatatagcctggaccttttcttcgtgcacttaactaatcatctggtggtacgtattccagggcctggatccaaagtgtacagccaatttatttgccaaggcacagtgcttaggggagaaaacaattggcgaggatgactgcttcgttctaaaagtagctgctgatcgagaagctgtaatggaaagaagcgaagggccagctgaggtgctgaggcatgttctatacggctatttttgccaaaaaagtggcctcttgatgtatttggaagactcccatctaacaagggtacagactccagaaaatgaaactatttactgggaaaccaccataggaagtagtatcggcgactacagagacgtggatggcgtgttaattgctcatcaggggaggtccattgctacagtctttcgattcgaggaagtgtctgtgcagcacagtaggactagaatggaagaggtatggcggatagacgacgtcgtgttcaacgtgccagggctttccatggattattttatccctcctgctgatatctttgatgcttctccatga

SEQ ID NO: 12 - DNA, 2775 bp, Salix sp.
atgggctcgagagctagaaggaagcagcgatggtgcgcacaaaccctaactccactgctggaaggtcccgaccccgacatgcaagaagaaggtaacaaaaaggaaagttcatgggaggtgattcgtgaatggtttcggttgcaaaagggtctttcagcaggaaacaatttctcagtaccgttatatgggagtattccggtgaaaagacaggatttaaggcttttacttggagttctgggctgccctctagctccaatccctctggttaacgaccccatccatcgcattcacattaaaaacacccctattgtaagttcttctacaccttaattatcattttgttttttgttttcaattcggcagctccattttatcagatttttttacaggaaaattccgccgcgcattatatcatacagcagtatttggcagcaacagggtgtttaaagcagcagaaatgtatgaaaaacatgtactcaacaggaagtgtgaagatgattcgttgcgagacagaaatctcctcgggaaaaaatgtgaagagcttggggactagaagtggcgaaaacgggtgctttgttctctggcaaatgttgccgggcatgtggtctcttgaattggttgtcggagaaaataaagtcatagcaggcagcgacgggaagactgtgtggcgtcacactccttggctcggcactcatgctgccaagggaccccaacgccctctacgtcgcataatccaggtacgaactgataaatattttgtttttctcctggttgaagatgataagacaagatcaggaacattgttttttactctgcaatatatttttaatctactttaatcggatttacataccagatataaggatagagatggaagaacaaaataagttttctttaaagaaaatttaaaaaattgaagacctgtaaatcacaatcccgagaaatggtaggatctatgtacaagcagctgacatgatagggaaactgtcccgagctttaccagacagattaccttctttttttgaacactcgcattattgacagggttaggaatggcacgtgattttgtttttgacgtcatctttgatcgtgttcaaagcatatacacgtatattttttgggactgcagcttgtaatcatcactttgcgctttacttttccttttttgacactttagttaataagaacctgatttattgcattatcgcccctgcttttcttgccttccccccctcttccttgtttactttctacccgttcccacgtcaatttccgtctctcttttctccttttttttttttttggaataatggtgagcttcaaagttagagactatcgtggcattcttgaaaattgaaatcccaatatctcgtccggggctacttcctttgcctctagccccaagtgacggagggaggaacattcctttggagttttgggccaaaccaaaccctatttcgtaccaaaaaaaactagggaattagtcatgactcgtggaagaataattatggttttttttaattattattattaaaaactagggaatttgtatatgtttcctttgtttgccatgacatgagaggaatcactagcctccagttgttgacattatttgtcttattgatagtttgattaaaattgtttttaaaagtatttttcgtttaaaaatatattaaaaagatgtttttttattttttttaaattatttttaatattagtacatgaaaataatctaaaaatatcaaaaaaaattaatttcaactaaaataaaaataaaaaaaaaatcatttttttttaaaaaatatttttaaaatacagtgttaaacacccctgtgtccacgaaagcatattactgtgtacctcctttattttggtgtattatattgaaattgcaaggttataatgtcaaagctgaggtagaacatgtatagaagcaccaaaatatttgtagctccctcgtcatcatgcccttgttcttgtactaattagtaattcgagacttaaatcatctatcctccaatctcaaacgaaaagataaggatcgatgtagctaacagtacttcattgatttctttgaaatttatgaatttaattcgtggttctttcatttgatttcaggtatcttgccatgcttccttagttttttttttttttaatcatagctcaaacatgaaacctcttgaattataagttactagtaccaccctgccctgcatctaaatatcacatataacctggaccttttcttcgtgcacttaactaatcatctggtggtacgtattccagggcctggatccaaagtgtacagccaatttatttgccaaggcacagtgcttaggggagaaaacaattggcgaggatgactgcttcgttctaaaagtagctgctgatcgagaagctgtaatggaaagaagcgaagggccagctgaggtgctgaggcatgttctatacggctatttttgccaaaaaagtggcctcttgatgtatttggaagactcccatctaacaagggtacagactccagaaaatgaaaccatttactgggaaaccaccataggaagtagtatcggcgactacagagatgtggatggcgtgttaattgctcatcagggaaggtcgattgccacagtttttcgattcgaggaagtgtctgtgcagcacagtaggactagaatggaagaagtatggcggatagacgacgtcgtgttcaacgtgccagggctttccatggattattttatccctcctgctgatatctttgatgcttctccatga

SEQ ID NO: 13 - DNA, 1554 bp, Populus sp.
atggcaacttcagctccacttatctcaaaatcccagttatcgtccggcatagaaaccttggatcatcaggagcaacactcgctagatgacaccatcgaaaaatacatagaaggttttggaccggcacaatatctgcaagtcatccttgtgtcattggcatttctgttcgatggacagcaaaccttcattagtgacttttctgatgctgtaccctcatggcactgcactgattttagtaatcaaacttgttactcgagctccaatttttgcaatctctcaaacactgaatgggcctgggatgagccagccagctcatcgatagtttccgattgggcccttgaatgtggcagttcagtcatcgtcggcttaccggcttcaagttactttgtgggctccctgattggtggatttactcttgctacgcttgctgattcctggcttggtagaaagaagttgctcttcctaacttgtatgggtatgtccacaatggcacttatcactgccttctccaccaatgtgtggatctattcaggtttgagatttgttagtggactttttcgcgcatcaattggaacgtgtgttgttgtgatgtcaacagaaatggcagggaagaaatcgggtggatttgtaagggtggtgggcttcttgttttttgctctaggagcactctcactgccccttatagcttacttgaatagaggttctccatggagatatctttacatttatacctctattccagccatcgtttactgtataatagcttatttctttgttagtgagtctccaagatggctttgcatgcggggacgtgaagctgaagcagttgcaattctgaataaaatggttccaacaaaaaatattagtagctctattctaaaatctgcctacaagcccctcgaccatgagcagtcgaatcttgacatatattcatcgatgaagagcttgctggagaggagatgggctttgaaaaggttgttggctgcaatgactcttggttttggtgtgggaatggtatactatggcatgttcttgggggttggaagcttgggtttcaacatctaccttagcgtgacacttactgcatccttgaccataccttctattcttttgctcccttatgtaatagaaagatttaataggagaagttcagttgtggcctttggtatagcaagtggggtatgtagcattgtctgtgcaataattggtgaagaactaaagactgtccagattatcatgtctttagcatctgctttctgctcgtgtgctgcacttaacgtcctgcaaatatacactacagagttgttccctacttgtgtaaggatttcagccacatcaatgtttaggcaagctataaacttcggtcccatatttgttccactgttagtttcagctgccaggagaaataattctgtagtttatggagtctttggatcagtagaaatatcctgtatcttctttgtaatcttcttgccagagaccaggggtttgtcactttccaacgccatggatgaacaagagaagaaggataatgcaaacgcgtatgtaagctga

SEQ ID NO: 14 - DNA, 1536 bp, Populus sp.
atggcagattcaacaccacttcttctctctcgaccggacccttccaatgagtcaaaacaacctccttcccttgatgaaaccattgaacgttgtattggagagtttgggctcgcccaactcctccaagccatccttgtgtcatttgcatgggtgtttgatgcacaacaaacattcattagtgttttcactgatgctgagccaaaatggcactgcacaagtgattcatgtacttcagtctccgacatttgccatcttcctcaaaattcatgggcttgggatagccctaaggacacatcaatcatatcagaatggggacttgagtgtgctagttcaataatcaaaggcctacccgcatcttcatttttcatggggtgcctcattggaggactgatgctagccacgcttgctgattccttgcttggtcgcaagaatttgctgtttctatcatgcctaatgatgtctttctctggattattcactgtcttctccaacaacatatggatctactcggccttgaaattcgttaatggtgtcggccgtgcaacaattggaacatgcgcccttgtgttatcaactgagcttgtagggaaacgttggcgaagccaggtaggagttattggtttcttttgtttcacgctagggtttttaacattacccgcttttgcatatatgaatagaggttcctcttggagaactctttatctatggacttcagtaccaacaattttctactccatattagttcatttcttagttcgagagtctccaagatggctttttgttcgcggacgtaaagaagaagccgtgactatactgaagagtattgctacggctgggagtagtggcatactcatgagcttctcaaatttggaattcgggaaagagtcatggaatgttgatacttattcagcaatcaagattctcttaaagaaaaagtgggcttgcagaagactgttgacagtcatggcagtggtattcggtattggaatggtgtattacggcatgccattaggcctcggaaatttgtcattcaatctctacttgagtgtcacatttaatgccttgtcagagctacctgcctcattagtgacattcttcctcgtagacaaactaaaccgaaaggattcgctgcttgttttcaccactctaagtggggtttgtagcatcctttcagttgtgatgggcgagacatctgcaaatctacaaatggggctggagctggtatcttttttctgcgcatgtacagcattcaacatttcattgatccacacactagagttattccctacatgtgtgaggaattcggcaatatcaatggctagacaatctcttgtattcgggggtatgttcagtccggtgctggtggcggttggaagtaagaacaggtttctgtcatacgggatatttgggatggtaatagggatttgtgggttgtttgtgatattcttgccggagacaaggggcaggacaatttgtgacaccatggatgaggaagagtacaacagtacaaacaatgatctgcctgtgttggggtga

SEQ ID NO: 15 - DNA, 1539 bp, Salix sp.
atggcagattcaacaccacttcttctctctcggtcggagtcttcaaatgagtcaaaacagcctcctccctcccttgatgaaaccattgagcactgtattggagagttcggtgtggcccaactcttccaagccatcctcgtgtcgtttgcatgggtgtttgatgcacagcaaacattcattagtgtcttcactgatgccgagccaacatggcactgcaccagtgattcatgcacttcagcctccgacatttgccgtcttcctcaaaattcatgggcttgggataaccctaatgacacgtcaatcatatcagaatggggacttcaatgtgctagttcaataatcagaggcctgcccgcatcttcatttttcatggggtgcctcattggaggactcatgctagccacgcttgctgattccatgcttggtcgaaagaacttgctgtttctatcatgcctggtgatgtcgttctctggatcattcaccatcttctccaacaacatatggacctactcggccttgaaattcgttaatggattcggccgtgcaacaattggaacgtgcgcccttgtgctatcaactgagcttgtagggaaacgttggcggagtcaggtaggagttattggtttcttttgtttcacgctagggtttttaacattaccagctttcgcatatgtaaatagaggttcctcctggagaaatctttatctatggacttctgtaccaacaattttctactccatatcagttcatttcttagtccgagagtctccgagatggctgtttgttcgcggacgtaaggatgaagctgtgtctatactgaagagtattgcaacggctgggagcagcggcatcctcatgagcttctcgaacttagaattaaggaaagagtcatggaatgtcgatacttattcagcaatcaagattctcttgaagaagaagtgggcttgcagaagacttctgacagtcatggcagtggtatttggtattggattggtgtattacggcatgccactaggccttgcaaatttgtcattcaatctctacctgagcgtcacattcaatgccttgtccgagctaccagcctcattggtgacattcttcctcgtagacaagctgaacagaaaggattctctcctcgttttcaccactctaagtggtgtttgtagcatcctctccgtcgtgacgggcgagagatctgcgaacctgcaaatggggctggagctggtgtctttcttcagtgcatgcactgcattcaacatctcgttgatatacacactcgagctatttcctacatgcgtgaggaactcggcaatatcaatggctagacaatctcttgtgttcggcggcatgttcagtccagttctggtggcggcaggaagcagaaacaggtttctgtcgtatgggatattcgggatggtgatagggatttgcgggctgtttgtgatatgcttgccggagacgaggggcaaaacaatctgtgacaccatggacgaagaagagtacaatagcacaaagattgatctacctgtggtggggtga

SEQ ID NO: 16 - DNA, 1539 bp, Salix sp.
atggcagattcaacaccacttcttctctctcggtcggagtcttcaaatgagtcaaaacagcctcctccctcccttgatgaaaccattgaacattgtattggagagttcggtgtggcccaactcttccaagccatcctcgtgtcgtttgcatgggtgtttgatgcacagcaaacattcattagtgtcttcactgatgccgagccaacatggcactgcaccagtgattcatgcacttcagcctccgccatttgccgtcttcctcaaaattcatgggcttgggataaccctaatgacacgtcaatcatatcagaatggggacttcaatgtgctagttcaataatcagaggcctgcccgcatcttcatttttcatggggtgcctcattggaggactcatgctagccacgcttgctgattccatgcttggtcgaaagaacttgctgtttctatcatgcctggtgatgtctttctctggatcattcaccatcttctccaacaacatatggacctactcggccttgaaattcgttaatggattcggccgtgcaacaattggaacgtgcgcccttgtgctatcaactgagcttgtagggaaacgttggcggagtcaggtaggagttattggtttcttttgtttcacgctagggtttttaacattaccagctttcgcttatgtaaatagaggttcctcttggagaaatctttatctatggacttctgtaccaacaattttctactccatatcagttcatttcttagttcgagagtctccgagatggctgtttgttcgcggacgtaaggatgaagctgtgtctatactgaagagtattgcaacggctgggagcagcggcatcctcatgagcttctcgaacttagaattaaggaaagagtcatggaatgtcgatacttattcagcaatcaagattctcctgaagaaaaagtgggcttgcagaagacttctgacagtcatggcagtggtatttggtattggattggtgtattacggcatgccactaggccttgcaaatttgtcattcaatctctacctgagcgtcacattcaatgccttgtccgagctaccagcctcattggtgacattcttcctcgtagacaagctgaacagaaaggattctctcctcgttttcaccactctaagtggtgtttgtagcatcctctccgtcgtgacgggcgagagatctgcgaacctgcaaatggggctggagctggtgtctttcttcagtgcatgcactgcgttcaacatctcgttgatatacacgctcgagctatttcctacatgcgtgaggaactcggcaatatcaatggctaggcaatctcttgtgttcggcggcatgttcagtccagttctggtggcggcaggaagcagaaacaggtttctgtcgtatgggatattcgggatggtgatagggatttgcgggctgtttgtgatatgcttgccagagacgaggggcaaaacaatctgtgacaccatggacgaagaagagtacaacagcacaaagattgatctacctgtggtggggtga

SEQ ID NO: 17 - DNA, 2960 bp, Populus sp.
atggcgcccgtgagcctccctcctggatttaggttccatccaaccgatgaagagcttgttgtttactatcttgatagaaaaatcaacggccgcacaattgagcttgaaattatcccagaggttgatctctataaatgtgagccatgggacttaccaggtacgtgttaattttacatatgtaattaattaatttccatgcttacgtcaataatatttagtatcacctacatatgttcttatgtatgctcttagtgttctttctgacaaccttttttgtgataattcgatcaacagataagtcgtttttaccaagcaaagatttggagtggtatttcttaagccctagggataagaagtaccctaatggttcaagaaccaacagggcaacaaaagctggttactggaaagccacagggaaagatagaccagtgaactctcaaaagcggccggttggcatgaagaagacattggtgtactatagaggtagagctccccatggcattagaaccaactgggtaatgcatgagtatcgcttgatcgactcattgtgtggcgctgcaccatcaagtttaaaggtatatattgcactttcactactggctgcttgcggcacaattttcatttgatcaagtagggacacagatttaacccattgcataattaatgttcagaaatatcatgtaggtgaattaattaattatgaacatcgagccatgcatcatgatgaagttggatctgccccatctggtggttttggtggcattcatatatatgtagaccagtagtaacaggctattagggtttacaaaaagacaactaaatgagtttgattgtcggttttgtgtagaagatatatagtgatgaactttcaataggaattacacgaggctgcaagagagtttttggtctcataggaaaccttagtaacaatgacagatcgatgtaaattgagagtatttttttaggggtatgttatgttcatctttcagatgcgggtaaaattaattaatattaatattaatttcagtgctccatgtagcttcttccagttcaaattattaaaaaatttagaaacaattttgaattcattttcaagagcatattatatacagggagcagtagcacggttcaaattaagccaggactttatgtagtcaagcgaggaaaaaccatcatggattatgcttctttacatgacagatacgcaaacacatatatagagcagatcctgtcacatttagtcattgctcttgttttcatacaccaacatatcattttagatcttccttttcctgctaaatgttctctctttaataaagaataccttatcatcaacatatatgatgatgaaagagtctttgtttcatgactttaggtgtacttacaactatctttgtttggtttcttgtttccttttctgctctttgtgatcttgcttttacagatctttgtacacctctctttaacaaatttatgtttatttttgcaccacaggattcctacgcattatgccgtgttttcaagaaaacaatacatattccgaaaaagaaagaagaaaaaaataacgggaatgaagagaaggatgcagcgtgggtctcagaagaacaattattaggggatgacacaagcggtattgaaagttctaaagggagagaagctgaagatgaaaacttcaacaatgattattgtaaatttccatctgaaacatcttcctcggatgtcactcaagggactccaattgaaactgcaatagccgatgatttacaagctccgtttccctcagatgaagccaacagttcggctagcctttattcaatgggcgtggatttctcgtcaaatctaattcaggtacaataaacaaggttccttttacacattaatttaatttttttatggtttgatctgctgataactagttaatgtcggtccaagaattagtaattatttagttaactgcatatatatatatatataatatatatatatatatatatatgtctaatattaagtgtgtgtgacatggaaggataataaaaaaacattaggttattgatggtatgggccatgccaagattcacatgcaataatcatcttctccaagtcatccttttctgatcatgatatgatcatctcttttgccaataccacatttccagcaatattctgccttgatgcgaaagcttcatgttcacaccatggaaaataccacgtggttgtgtttcacgcagagaatgaaagtacaatcctcgggccagtatgtgttggaaatggcccacaacacaagccctttgagttttttctttcttttgatcttaagttaaagcaacaaaagttggaagcaatgaaactccctgtcttttcttaaagcttccttctaaaaatctctcaagcactgactcaaattagcttttttttcaccatctccaataacttcttttgactgactcgaacataattcaaagttcaaacatctttcttcctgatttttctctctgggtctactatatgtgacaccacaaacatcaccatttccaatgcatatgttcccccatttgaatcacattttgaaataatttccaattcaaaacatgttgctaggtttactgttttaattaattttcaaaaggagttgctttttccaactctcctctgaactctctctctctctctctctctcgttttttgggtacgagaccaattattaatcacacgacatgctgtggatgcaggatatgcagatgccaaactgctcaagcttgcattaccagtttccgttcccacctttagaacttgaggatttcccacagattagtatcaccgagagtatgaagccatcgaagcctgaaataatcgacgactacatgatgtacaaggattgcatgaacggaacactagaagagatcttctctttatgttcctctcaagacaactccaatactgtactccccatgcaagactaa

SEQ ID NO: 18 - DNA, 2814 bp, Salix sp.
atggcgccggtgagcctccctcctggattcaggttccatccaactgatgaagagctcgttgtttactatctcgatagaaaaatcaacggccgcacagttgagcttgaaattatcccggaggtggatctctataaatgtgagccatgggacttgccaggtaaatgctttacagatgtaattagctccggccataccgacatcatcaatattattcagcatcacctcatatatgcacctgacaactttttcttttcttttttctgtgatgattcgatcaacagagaagtcgtttttaccgagcaaggatctggagtggtattttttaagccccagggacaagaaataccctaatgggtcaagaacgaacagggcaacaaaagctggttactggaaagccacagggaaagacagaccggtgagctcgcagaagcggccggttggcatgaagaagacattggtgtactatagaggtagagctccccatggcatcagaaccaactgggtaatgcacgagtatcgcttgatcgactcatcattgtgcggcgccgcatcatcaagtttaaaggtatatattgcacttaattacggcacgatttctatttgatgcatgcacagaagtttaatcaagtagggacacaattttaacccattgcataattaattatgtccagaaatgtcatgtaggtgaattaattatgaacaatgagccatgcaatatcatggtgaattagctggatctgccccatcgatctggtggttttggtggcattcatatgtagaccagtagtgagaggctattaattagggtttacaaaaagacagccgtacgtgtttgattgtgtagaagatatatatttcaataggattcacacgcggctgcaagatcagagttcttggtctcacaggaaaccctagtactagcaaggaagatgaatgtaaagtggtccatgtctaattaattaattttaatattaatttttactactccaagtagattcttgatttcagttcaaataatcaaatgatttagaaaaacattaatatttttaagagcatattatatacaggattatgcttctttatatgacagatatgcaaacacatatatagagcagagatcttgtcacatttgctcttgtttttgtacaccaacaaatcatttttagatcttccttttcctactaaatgttatctctctttaataaagaataccttatcatcaacatatatgatgatgaaagagtctttgtttagtgactttacttgtacttgcgctatctttgcttggtttcttgtttctttttctgctctttgtgatcttgcttttacagatctttgtcactgcctctttaacaagttctggctcttcttgcgcgcaccacaggattcctacgcattatgccgtgttttcaagaaaacaatacatattccaaaaccgaaagaagaagaaaataatggaaatgataaggagaaggatgcggcggcggtatcatcagaagtgcaattattaggggacgacacagttagcggcattgaaagttctaaagggagagataatgctgatcatcgagatgaaaatttcaacaatggctactgtaaatttccatcggaaacatcttcctccgatgtcactcaagggactccgattgaaactgcgatgcccgatgatttacaacctccgtttccctccgatgaggccattagttcagctagcctttattccatgggcgtggatttctcgtcaaatctaattcaggtactgttactttttatgacataataattctggttcgttaaacaaggctccttttacacgttggttttagttttttgatggcttgatgatctttcgataaatagttaatgtcggtccaaaaaatagtaattaataataactaaatatgtaggtaactactgcatatagaatatgtctagatgggtgtgacatggaaagacagtagaaaaacatcaggccattgatggcatgggccacgcctagatccacatgcaacaatcatcttctccaactcatccttttctgatcatctcttttgctagcaccacatttccatcgatattctgccctgttgcgagagcttcatgttcacaccagggaaaataccacgtggctgtgcttcacgcagagaatgaaagtacaatcctggggccagcatgtgctgggaatggcccacgacacaagccctttgagtttctttctttcttttgatcttaagttgaaagccatgaaactccctgtcttttcctaaagcttccttctaaaaatctctctcactgactccaactagctttcttttcaccatcttcaataacttcttttgactgactcgaacataattcaaagttcaaacatctttcttcctgatttttctctctgggtctactctatgtgacaccacaattatcactacttccaatgcacatgttcccccacttgaaacacattttgaaatcatctccaattcaaaacatgttgctgggcttacatttttaatttaattactcaacaataatcttcaaaaggaggtggagttgctttctccacctccccgctgaattctctctcggtatgaggccgattattaatcacacaacatattgtggatgcaggatatgcagatgccaaactgctcgagcttgcagtatcaatttccgttcccacctttagaacttaaggatttcccacagattggtttcacggacggaatggagccatcaaagcctgaaataatcgacgactacatgatgtacagggattgcatgaacgggatatttgaagaaaatttctacttatga

SEQ ID NO: 19 - DNA, 2834 bp, Salix sp.
atggcgccggtgagcctccctcctggattcaggttccatccaactgatgaagagctcgttgtttactatctcgatagaaaaatcaacggccgcacagttgagcttgaaattatcccggaggtggatctctataaatgtgagccatgggacttgccaggtaaatgctttacagatgtaattagctgatcccataccgacatcatcaatattagtcagtatcacctcatatatgcacctgacaactttttttttcttttttctgtgatgattcgatcaacagagaagtcgtttttaccgagcaaggatctggagtggtattttttaagccccagggacaagaaataccctaatggatcaagaacgaacagggcaacaaaagctggttactggaaagccacagggaaagacagaccggtgagctcgcagaagcggccggttggcatgaagaagacattggtgtactatagaggtagagctccccatggcatcagaaccaactgggtaatgcacgagtatcgcttgatcgactcatcattgtgcggcggcgcatcatcaagtttaaaggtatatattaattgtacttaattacggcacgatttctatttgatgcatgcacagaagtttaatcaaatttaacccattgcataattaataatgtccagaaatgtcatggaggtgaattaattatatatgaacaatgagccatgcaatatcatggtgaagctggatctgccccatcgatctggtggttttggtggctttcatcatatgtagaccaggagtgagaggctattaattagggtttacaaaaagacagccgtacgtgtttgattgtcagtcttgtgtagaagatatatatttcaataggattcacacgcggctgcaagatcatcagagttcttggtctcacaggaaaccctagtagaaatgacagatgaatgtaaagtggtccgtgtctaattaattcattttaatattaattttactactccaagtagcttcttgatttcagttcaaataatcaaatgatttagaaaaacattaatatttttaagagcatattatatacaggattatgcttctttatatgacagatatgcaaacacatatatagagcagagatcttgtcacatttgctcttgtttttgtacaccaacaaatcatttttagatcttccttttcctactaaatgttttctctctttaataaagaataccttatcatcaacatacatgatgatgaaagagtctttgtttagtgactttacttgtacttgcgctatctttgcttggtttcttgtttctttttctgctctttgtgatcttgcttttacagatctttgtcactgcctctttaacaagttctggctcttcttgcgcgcaccacaggattcctacgcattatgccgtgttttcaagaaaacaatacatattccaaaaccgaaacaagaagaaaataatggaaatgatcaggagaaggatgcggcggcggtatcatcagaagtgcaattattaggggacgacacagttagcggcattgaaagttctaaagggagagataatgctgcttatcaagatgaaaatttcaacaatggctgctgtaaatttccatcggaaacatcttcctccgatgtcactcaagggactccgattgaaactgcgatgcccgatgatttacaacctccgtttccctccgatgaggccattagttcagctagcctttattccatgggcgtggatttcccgtcaaatctaattcaggtactgttactttttatgacataataattctggttcgttaaacaaggctccttttacacgttggttttagttttttgatggcttgatgatcttttgataaatagttaatgtcggtccaaaaaatagtaattaataataactaaatatgtaggtaactactgcatatagaatatgtctagatgggtgtgacatggaaagacagtagaaaaacatcaggccattgatggcatgggccacgcctagatccacatgcaataatcatcttctccaactcatccttttctgatcatctcttttgctagcaccacatttccatcgatattctgccctgttgcgagagcttcatgttcacaccagggaaaataccacgtggctgtgcttcacgcagagaatgaaagtacaatcctggggccagcatgtgctgggaatggcccacgacacaagccctttgagtttctttctgtcttttgatcttaagttgaaagcagcaaaagttggaagccatgaaactccctgtcttttcctaaagcttccttctaaaaatctctctcactgactccaactagctttcttttcaccatcttcaataacttcttttgactgactcgaacataattcaaagttcaaacatctttcttcctgatttttctctctgggtctactctgtgtgacaccacaaatatcactacttccaatgcacatgttcccccacttgaaacacattttgaaatcatctccaattcaaaacatgttgctgggcttacatttttaatttaattactcaacaataatcttcaaaaggaggtggagttgctttctccacctccccgctgaattctctctcggtatgaggccgattattaatcacacaacatattgtggatgcaggatgtgcagatgccaaactggtcgagcttgcagtatcaatttccgttcccacctttagaacttaaggatttcccacagattggtttcaccgacggcatggagccatcaaagcctgaaataatcgacgactacatgatgtacagggattgcatgaacgggatatttgaagaaaatttctacgtatga

SEQ ID NO: 20 - DNA, 1033 bp, Populus sp.
atgtcgatactgtggaagaagagcgaggcctggaggtggatagtgaggatgacaagagactcaaagccattcttcttcgcattcgctgcatgatgcggtgtcgttccaggtgtgattgggtatttcgtgatgcaaaccaccaactcccgcaaccccgagctcgaagcccgcctccgttagaacgcgcgtcccgattcccctgtacgtacgttatatatatatatatatatacttgaatcaccgttgattttctccataaaaacgtttgatctgcagatttttgggcatggcccgctatttgtgattattgacatatcttaattcctgattattttgttaacttggttatttcaagaatctgactctgactctgatgctatatttttaagtagtttagcatcgaatgctagaaaataatatatgaaaagtacgttaatcactcatagatatcaagaggaagaatggaagggcggtaaagcttctgaaggatacctcaattagcatagagttgcagactagtcactggatacttttcatcttggttaagcttccaaatttcaatatatggcagatggatttcacaggtaaggccacttctaactgaagtcatcttttggtaatcacaggaatgaaagtgcatggcagtgacctcagagtagctgctttagatacttaggttagttcctctttaatttctgtctcatatcctagagttaagattgccccaaaatcttgggtcatggttaataattatcacccttttgatcttcaaatggaagtacatgttgacaaattttgtttgctcgaatttctcaatcagatgatgggtaaagttaatcgagagagactggcagaataccttggcgagctgcagcggaaagaggatacaaacgatcgctatgtagctgctctaagaggggagacatttacaagaaacccatatgtaaggattcagtcaatacccaagcggaataacactgaagctggcaaggagcagaaccttgataacgatcaaaggaagcagattagttga

SEQ ID NO: 21 - DNA, 1154 bp, Salix sp.
atgtcgatactgtgggagaagagcgaggcctggaggtggatagtgaggaagacgagagactcaaagccattcttcttcacattcgctacagtatgcggtgtcgttccaggtgtgattgggtatttcgtgatgcaaaccaccaactctagcaaccccgagctcgaagcccgcctccgtcagaacgcccgtcccgattcccttgtacgtacgttatatatatcttgaatcaccgttgattctctccataaaaacgtttgatatgcagatttttgggcatggcccacgttgtgattattaacattttaattcccaattcttttgttaactcggttgttttaagaatctgaccctgaccctgatgctatatttacaagtagtttagcatcgaatgctagaaaataatatatgaaaagcatgttaatcactcatagatatcaagaggaataatggaaggggggcaaagttttctgggggaggggtacaacaattagcataaagttgcaaactaatcactggaaacttttcatcttggttaagcttccaaatttcaatacatggcagatggatttcacaactaaggccacttctaactgaattcatcgtttggtaatcacaggaatgaaagtgcattgcagtgacctcagagtagctgctctagatacttaggctagttcctcttcagtttctgtctcatatcctagaggtatattgccccaaaatcttggatcatggttaaacaatcttaaactgcgttatctttacttgaatttaagcaatgttagacctattattttgtgatgaattcacatggtagaacttgatttttaagtagtctcgacattgaaacggctgtttttattttaataaacgagtttaattctactgtgattgtataaagcctttctcatcttcaaatggaatcacttgttgacaaattttgcttgctcgactttctcaatcagatgatgggtagagttaatcgagagagactagcagaataccttggcgagctgcagcggaaagaggatacaaacgatcgatatgtagctgctcttagaggggagacatttacaagaaacccatatgtaagaatccagccaatacccaagcagaatagcactgaagctgacgatcaaaagaagcagattgtttga

SEQ ID NO: 22 - DNA, 1153 bp, Salix sp.
atgtcgatactgtgggagaagagcgaggcctggaggtgggtagtgaggaagacaagagactcaaagccattcttcttcacattcgctacagtatgcggtgtcgttccaggtgtgattgggtatttcgtgatgcaaaccaccaattccagcaaccccgagctcgaagcccacctccgtcagaacgcccgtcccgattcccttgtacgtacgttatatatatcttgattcaccgttgattccctccataaaaacgtttgatatgcagatttttgtgcatggcccactgtttgtgattattgacattttaattcccaattcttttgttaactcggttgttttaagaatctgaccctgaccctgatgctatatttaaaagtagtttagcatcgaatgctagaaaataatatatgaaaagcatgttaatcactcatagatatcaagaggaataatggaaggtgggcaaagttttctgggggaggggtacaacaattagcataaagttgcaaactaatcactggaaacttttcatcttggttaagcttccaaatttcaatacatggcagatggatttcacaactaaggccacttctaactgaattcatcgtttggtaatcacaggaatgaaagtgcattgcagtgacctcagagtagctgctctagatacataggctagttcctcttcagtttctgtcttatcctagaggtatattgccccaaaatcttggatcatggttaaacaatcttaaactgcgttatctttacttgaatttaagcaatgttagacctgttattttgtgatgaattcacatggtagaacttgatttttaagtagtctcgacattgaaacggctgtttttattttaataaacgagtttaattctactgtgactgtataaagccttctcatcttcaaatggaatcacttgttgacaaattttgcttgctcgactttctcaataagatgataggtagagttaatcgagagagactagcagaataccttggcgagctgcagcggaaagaggatacaaacgatcgatatgtagctgctcttagaggggagacatttacaagaaacccatatgtaagaatccagccaatacccaagcagaatagcactgaagctgacgatcaaaagaagcagattgtttga

SEQ ID NO: 23 - DNA, 7073 bp, Populus sp.
atgtccaaggagccatcatcgtcactgagtaatactgctagagccactggtagtgatactagcagtcaagcaaagggaaccagtcaagcaaagggtggttccaaattggagaagaagcaatccatcaagcagaaatatagtttcatccctgataatttttcttccctagaacaggtacgtgccaatcatcctctttaattattttctttcattttcttggaagccttgctggtaattttcattcaggatagataattttccacttattgagcaaactacacacacacacacatattattcgataagagaatggatattaatttcttgatgacttgcggaaaatttgtctggttagccgttgcgatcttagtcaatttgtctgatttgacttttccctgatggaatctcaggggaatcttcttatcaattcgcactctccactccactccatgccgtttcgtttgcttttcaaatactacttgcttcttattctaaaaaaatattacaatgctccatggaaaaagataaaataataatggaaaagtgatatccgaccagtcaaaatatcgcaaggtgcttttattttttattttttctgttaaacaaagtcacgacagtactgttagtgtggtccagacgccaactttccttcttttttttcccgcttggattataaaggaataaagtagctgtgttttttaaagtattttttattaaaaatatattaaaatatattttttattttttaataattattttttatattaatacattaaaacaattttaaaaaaattcaaaagtgttagaaacttaagttgaaatttgaaatgctattccaatgaaaattttcaaatcgaagaaaataggtatttatttgacattttgtttgtaaaatactgtcattttattcaaaccgataacatccaacaaagccacataagagcgaatttttttgaaaggactgaaaagaaaaatcatgttaatttttttttttttaaaaaagtgatagctatattgttattttttaataaattgaaaaataactcgttatttattttttctgattttttttcgttaatcttaacctcttttttttccggcgccaaacggccaaggataaacactcctaagatatacaggttcatggaacacacgcagacactcacgaaacatgtttttttttaatcctttgatttccatgtgtttttttatgggatatttagaagtgtgattttttaaagttttttttgtttgaaaatatattaaaataatttatttttagtttttttaaaatattttaacaccaacaaattaaaataatatgaaaatattaaaaaaatattaatttaaaacaaataaaaaataaaaaaaatttaatttttttaaaaagcaaaaataaacataactttaaaaatatattaaaataatatatatttttatttttaaataaacacattaaaataataaaacattaaaaaaaataatctaaccacatttctaaacagtcctaaatcatcaaaacaacttcaaattatcacggtgagaatacaattttttaaaacaaagaaaaagaaagatataatcatatgtatagtttatttttacatttgaaattatatttatatgtgatttaaaagtgtttttaaatttataaaaatataaaattaatttttttataaattcttattattcataacatcatttaatcaaatattaatcaaattcctaacaaatattcactgaaacattcgatatgaattcataaaaatcgaagttgaaattgtcaattatgaaacaagaaagaaagtatacactccacatgtcatgattccctgagagaagagaggggccattattgccaaccactggcaataaagctaacgcgtttttggtcatcacgtcgtcaacacggtgtcttcttctcaatggaaacgtgaaagttagataagataataaagaaaagcaagttttttcaatcatcaagtattattggtgaccccaggcactattgaaggttttcaagtaattgactgactgaatctcgagggatataatttaactaatcagtttctagatttgttctttaaatattactagtttaaattttataaactctagtattattagaaatttacatgattattaactttagaatccgtgagattagtcaaggtacgtgtaagttggcctagacaccacattaataataaaaaataataattgaatgagtgattttttttataaaaaaacaggctacataattaaaatagtccgttttattctcaaatttcatctatttttcttttcttttctactaatgttttacagacagatttctcattcaatttttttttctataaacacacgtgacagctattattataggagaagtcagtcgtttaaaattcacgagactcacaccttatcattcacgttcaatttgaatattaatatagtacaaaaactaaggtaaattacaaaaatatcttgaagtatcataaaactactaacaccgtaattttttttttaatttagacagtatttgaaatgcaggccgatccacgtttgtaaaaatttaaaaaaaattatattttaaattgttttgatgtactgattcaaatataaattttataaaatttaaaaatattattttaatgtatttcaacatgaaagacactttgaaaatcaaccgcaactataacttccaaacaggccctatacaaccccacacccctcacgttcaaataaatattataaaaacctcatccttttatttaaaatgcttttaatatttttggcatgcataattctatgtttctcatggtggttgttataatatcttcatattttagattattattattattattattattattattataaatttaatggaaactattgtaatttatcctaaaaaaaagtctgcaactcattttcattttcaatgatcgaaacttaaaaatttaatggaaatcataagctttatctcttgcaataaattatcgattatcacacgagtccacattcaagactcgacgagttctacaatattttcatggtaattatcgcttaatttatatgaataagcttatgttaagtgagcttcgtacaaagatttctccaaagcctgcaccttgggaacgggagctggattcaatttcaacgtgaaccaagctttaatgtgtgttcaataatataatgtaaagtggttagtaaaagtgttttacaattaaaaatatattaagattatattttcttaatatttttatttattttttaagattatatatataacagtagaattattgtatttttttattaactatgaaaaaataaatttcagatttgatgctcaaaaatcatctttagccttattatttatactcaattccaatctatttataaactattctagtcattttagatcggtatctgtaaaaagaaaatcattcaaagaaaaatgtaaacgtgttcacgtgatccacgtggacgactgctgttttgattaacagaagcaaatgaccgagtcaactctactgggtttcgggaccctgctgtgcttttgtcgactgttcagtttgaccaaaattaaataaataaattgggatggaaattaatatggtccttgtattttatcttaaatttatatttcagattttattctttaatttgaccaatatataccttaattttaaaaatccattagtcgagttaatggttcaaggggtgaggtgcaagttgcaacttcaaatacgcagagctttttgtaaaccttctgcaaacgctcgtcatgtgttatagcattaaattgttaacgttaggtattgctttgttgattatgcatggaaatcatttgctagcaacgggcgtaatttcaataacagaagtttgttgcttcagtatagataaaaatatggctactcggttgaattctcgcagtctactactaacaggctccccccctcttttacaggttacgacagccttgagggaagctggactggaatcatcgaatctcgttgttggaattgatttcactaaaagcaatgaatggacaggtatgtgcaagtgaactaatcacatcgtcgatttgtaccataaaatttgtgttttgctttatcagttattcaggaatttggattttgagacttccatgaagttgaaataagtattcagagtcgaaaaaccaatctttagaaacctaagggggcggcaatctaataatatagcagaatggttcaattatatcctcgtgttttctgttcctttgaattggtttgtctctcatggatgtcaattgttgattttcattttaaaggcaaagtctcgttcaataatcgtagccttcatgccatcggagacacacctaatccatatgagaaagccatctctattattggaaagacgatggctccttttgatgaagacaacttaattccttgttttggctttggtgatggtaggttcagtccctggaagttgaattctaacaatgttgtttctagttttgcaccttataactcagctgttgatttgatttttctttttatctatacagccaccactcatgatcaagaggtgtttagctttcacagtgatcattcaccttgccatggttttgaagaagtcttggcatgctacaaaaagattgttccaaacttgcgactttcaggtttgttccttgcttatttgacgttggaatttggtcttttatcagttccttagttttcttaattagacccatggttgaacattacttctacaaagattcttgtgttttacttatttctcaagccacaaaaatcttcaccgatatatgttttggttttaagggccgacttcgtatggaccggtgattgaggctgcaattgacattgtggaaaaaagtggaggccaatatcatgtattgctcatcattgcagatggccaggtttgaattcaaaaccctctctccttttctgcatgcttgcatgtgtttgtttctgtatggatggatgcatagggaatcaaagtaacagtctctttttctgtgaaggtcacaagaagtgtggatacaggcgatggagaaatgagtccacaagaagagcaaacaatcaaggcaattgtcgatgcaaggtcgagccttacagataaatgcaaatcatttaaacttgctcagactaacattcatagaaaatatatcctagtgtcatactataactttcatctaattaaaatgacgaacttaggttcttattagaactgtcactttcttggtgcgcttcgggtgccagcccatttacatttggtgttatgctggttatggaatagggttgctaatcattagcagctgcttgataaacttacttttcattgccactagaatggccatgacattccacttcacagactgctatacttgacctgctattgttacatgacttgcctagatagagatgtacatgactttggcagatgcataaaaagaaggtggtcaactgatgactgtctttatttattgagaggtgatcccattttgcgatgtcaatcacttgtaaactatcaaatgaatcataaggggtcaacaatctacttttagatcctagtaagtatacagattatcttgcgtcataaccagattgttatccagttatttgtttgtgtcatgccagctcgatattgcatttgtatgtgaaaaacactcaaagtccacacagaacatcgaggatgcagaatgattgcttcatgttctcctccacagtcagttattcataactttattgcactgagtttacctgttttgtgttccctaacatgccagtcagcctgtatcaacagtaagtggatgtaaagttgaatctaatgattttcatcatcggattctaacaatgccagaaaatggagttgtgtttattctgaaatgtgttgccatttcttttatgaaaagcaattacaatgtgtaaccttatgatattcttaaacagttcatacccactttcgataattcttgttggagttggtgatggaccttgggaagacatgaaaagatttgatgacaaactcccagcacgtgaatttgacaattttcaggtatagtgataacaaaatgaatgttaatttcgaatgccatccaacattgtgatttaatttaatatacgatctagcactttatcaacttgtttctgaattgtgtgcagttcgttaatttcactgcaattatgtcaaaaaatgcaaccatctccgagaaagaaacagcttttgctctagccgctctgatggagattcccctccagtataaagcagctgttgagtttggtattatcgggtaggttgataaacttgtttattcactgctccatttttttaacacagctttgccagcatttgaaaacgttttgaaaatttcaaaataaaggccttcagcaggggagccaattctaaaactggtcagcacgtcttagttttgaatctgggtatggaaaaaattggttggcttgccctttcaatttcaaagagaaaacagcaatggaaggatttccatttttacgtttcccagcattcctaatgcactggccactttgttctgcataccatccatttgtttttacgtgttgtctcatatatttaaatggcctttggataaaagacgttccatgggacaagcaaagaaaatcgtaccacgccctcctccagttccttattctcgtcgtccagtgctagatcgtgaaccaacccatgtttcttctccggtcttggatgaaagaacccaggtttgaaaataatctcgtgtaatgctgtctttttgtctggaacattgtagctcgtctataatttataactttgaaatgtgtttttcaatttgattataggcctgccctatttgtctgactaatagaaaggacttggccttcggctgtgggcacatggtgagctgccacataaacattgccagctttgtttttgcttaacctttttgttacgatactaataccgttgcttggttgtagacttgtagagactgtggatctagagtatccagttgccctatatgccgccggccaatcaccagccgtatcaggctgtttgcttaa

SEQ ID NO: 24 - DNA, 5335 bp, Salix sp.
atgtccagcgaaccaccgtcgtcactgtgtaatactgctagtgccaccggcggtgattctaaaagtcaagcaaaggctggttccaaattggataagaagcaatccatcaagcagaaatacagtttcatccctgataatttcacttccctagaacaggtatgagcctcataactattttctttcatttcctggaagttttgcttatattttttcttctagaatagataattataattataattgtatccgaccccccatctgtcggatacaattacaatttgtttttttttttaaaattcaaattctcgctgatgtcaatttaaaccgaaatacaaaaagcttagtcaatttttctgatttgacttttctctgacggcatctcgggggaatcttcttaccagcttgcacactccactccactcaactccaaaagttccgtttgcttttcaaatgttgttattcaaaaaaaaaattataattcaacatatcaaagtatcgccaggtgcttttatatttataattttacccaaactggtaacatattatttttttgtatttaataaataaataaattaaaaaacaatcatttctattcactccatcactgatgaaacatgttttttttttttcaaacacaaaaacactacttatgcatctttgtacgtggagattatgtatttgaaattagggtggaatgttttttattttaaaatatttatttatttatttacatcaacatcttaaaacaccaaaaaacattaaaacaatattaaattaatggtttttctgaagaaaacaaaaatttgaaaaaaattaatccgaccgactcttaaatcactactaaatataaaaataacactcattgttaaaataactcccaattatcacggtgagagtacaatctttttaaaccaaagtaaaaaaaaaaatgatataactacttagccactatttattttggtgtttggaagtttgtttatgcgtgttttaaaaatatattttaattgaaaatatattaaattactattttttaataatgttaatgtgtttattttataaataaaaaaatatttatatatattttaagagaaaaaaaatattgatgtatgcacttaatttgacccagtcttgaagttttttagttggccgtattcaaagttttgactgtactctaggcctctcgctacctagataaataattatctcacgtgattaatgaatatgtttaattgtttgattaattttgttttgaaaattgatttttatttaaaaatatattaaataatatatattttttaaattatttatgatattaacccattaaaataatttaattaaaaataaaatataaaaatatttttttttttgaaaccctgcgagaagaggggccataattgacaacgactggcaataaagcgaacgcgttgtaggtcatcccgtcgtcaacacggtttctttcttcactcaacggaaacgtggaagttggataaagataataaagaaaagcaagcttttttattcatcaattattattggtgaccccaggcagtactgaaactgttcaagtaattgacgggctgattttttttatattattaataaaataaaaaaaaaacagggtaaataattaaaatagtccgtttttattctcaaatttcatcaattattttttcttttctacgcatgttgttttacagtgaaatttctcgttcagatttttttctcagagttatttttataggagaagccagtcgtttaaaattcacgattcattttgaatataaatacagtgcaaaagttaggtaaattacgaaaatatcataaaataactcacacaataataataataataataataataataataataataataataataataataatagaattgtattcttattaactttatagtcattttagaccggtatcctgcaaaaagaaatacattcgaagaaaaaaattccactagtcgagtcactagttaagcggtgaggtgcaagttgcgacttcaaacacgcagagctttctgtaaaccttctgcaaacgttcaccatgtgttctggcattaaacgttaggtattgttttgaagtgcttgtttattaagaatggaaatcatttgctagcaatgtacgtaattttcataacagaagcttgttgcttcagtataggaataaaaatggctacctggttgaactctcacagtcccccccctccccctcttttacaggttacgaaagccttgagggaagctggactggaatcatcgaatctcattgttggaattgatttcactaaaagcaatgaatggacaggtatgtgcaagtgaagtcatcctatcgtcgatttgtaccttaagcattgtgttctactttatcagttattcaggaatttggattttgagacttccgtgaagttgaaataagtatccagagctgaaaaaccaatctttaaaaacctaaggaggcaatctaataatatagaagaatgattcaatcatatactaaggactggaatggttataaaaaggctatttaaattatatcctcgtgttttctgttcctttgaaatggtttgtgttttggcttgtctctcatgcatgtcaatgtgctggttttcattttaaaggccaagtctcattcaataaacgttgccttcatgccatcggagacacacctaatccatacgagaaagccatctctattattggaaagacgatggctccttttgatgaagacaacctcattccttgttttggctttggcgatggtaggttcagtccctggaagttgagttctaacaatgttgtttctagttttgccccttataattcagctgtcgaattgattgatttattatatctatacagccaccactcatgatcaagaggtgtttagctttcacagtgatcattcatcttgccatggttttgaagaagtcctggcatgctacaaaaagattgttccaaacttgcgactttcaggtttgctctttgattatttgatgctgcaattcggtcttttatcaactccttagtttacttaattagaatgatggctgaacattacttctacaaagattcttgtgttttacttatttctcgagtcaaataaatcttcacaaatatatatgttttggttttaaggaccaacttcgtatggaccggtgattgaggctgcaatcgacattgtggacaaaagtaaaggtcaatatcatgtattgctcatcattgcagatggccaggtttgaaatttaaaatcctctctcctttcctgcatgcttgcatgtgtttgtttctgtatgtatggatgcatatgtaatcgaagtaatagtctcttttactgtgaaggtcacaagaagtgtgaatacaggcgatggagaaatgagtccacaagaagagcaaacaatcagggcaattgttgatgcaaggtcgagccttaaagataaatgcaaatcatttatacttgcttagactaactttcatagaaaatatatcctatggtcatatgataactttcatctaattaaaatgacaaacttaggttcttattagaactattactttttagagcttctgttgttacatgacttgcctagatagatgtatatgacttgggcagttgcataaaaagaaggtggttaactgatggctgtctttatttattgagaagtgatcccatttagtgatgtcaagcacttgtaaaatatcaaatgaatcataaggggttaacaatctacttttaggtcctagtacgtatacagatttatattgcatcataaccagcttgttattcaattatttgtttgtcatgctagcctgatattgcatttgtatgtgaaaaacactcggtccacacagaacattattttattgcaacgagtttacctgtttagtgtccgaacatgtcagtcaacctgtatcagcagtaagggggtgtaaagttgaatctgatgacatcaatcatcagattttaacaatgccagaaaatggtgtcgtgtttatactgaaatgtgttgccgtttcttttatgaaaagctattacaatgtgtaaccttatgatattcttaaccagttcatacccgctttcaataattcttgttggagttggtgatggaccatgggaagacatgcagagatttgatgacaaaatcccagcacgtgaatttgacaattttcaggtacagtgatgacaaaatgaatgttaagctcgaattccatccaacattctgatttaattttttatacatattagcactttatcaacatgtattgtgtgcagttcgttaatttcactgcaataatgtcaaaaaacacaactatctctgagaaagaaactgcttttgctctagctgctctgatggagattcccctccagtataaggcagctgacgagctttgtattatcgggtaggttgataaacttgtttattcactgctccacactaaagcattgccagcatttgaaaatttcaaaataaaaaccatcagcagtggagccaattctaaaactggtcagcacgtcttggttcaaatctgtgcataaataaaattggttggcctgtcctttcacttcaaatgagaaaacaacaatggaagggtttccatttttacgtttcccggcatcctaatgcactgaccattttttttctgcataccatcaacttgttcttacgtgttgtctcgtacattcaaatggctttcggagaaaagacgttctttgggacgagcaaggacagtagtaccacgccctcctccagttccttattcccgtcgtccagtgctagatcgcgaaccatcccatgtttcttctccggtcctcgatgaaagaacccaggtttgaaaataatctcgtgtaattctgtctttttgtctggaacattgtagctcgtcgataatttataactttgaaatatttgttttccaatcttccattttgattacaggcctgccctatttgcctgactaatggaaaggacttggcctttggctgtgggcacatggtgagctgccacctaaacattgccaactttgtttttttagtgattgattaagaacgtgtttacagttgctattaaaaatatatttttttagaaatatcaaaataatattttttttattttttaaaaattatttctaatatgaacatgaaaatgacttaaatagattttttttttaaatttaaaataaaacataaaattatttttcaaatacagtgtcaaatactaatacctgttgctgggttgtagacctgtagagactgtggacagagagtatccaattgcccaatctgccgccagccgatcaccagtcgtatcaggctgtatgcttaa

SEQ ID NO: 25 - DNA, 5353 bp, Salix sp.
atgtccagcgaaccaccgtcgtcactgtgtaatactgctagtgccaccggcggtgattctaaaagtcaagcaaaggctggttccaaattggataagaagcaatccatcaagcagaaatacagtttcatccctgataattactcttccctagaacaggtatgagcctcataactattttctttcatttcctggaagttttgcttatattttttcttttagaatagataattataattgtatccgaccccccatctgtcggatacaattacaatttgtttttttttttaaaattcaaattctcgctgatgtcaatttaaaccgaaatacaaaaagcttagtcaatttttctgatttgacttttctctgacggcatctcgggggaatcttcttaccagcttgcacactccactccactcaactccaaaagttccgtttgcttttcaaatgttgttattcaaaaaaaaaattataattcaacatatcaaagtatcgccaggtgcttttatatttataattttacccaaactggtaacatattatttttttgtatttaataaataaataaattaaaaaacaatcatttctattcactccatcactgatgaaacatgttttttttttcaaacacaaaaacactacttatgcatctttgtacgtggagattatgtatttaaaattagggtggaatgttttttattttaaaatatttatttatttatttacatcaacatcttaaaacaccaaaaaacattaaaacaatattaaattaatggtttttctgaagaaaacaaaaatttgaaaaaaattaacccgaccgactcttaaattactactaaatataaaaataacactcattgttaaaataactcccaattatcacggtgagagtacaatctttttaaaccaaagtaaaaaaaaaatgatataactacttagccactatttattttggtgtttggaagtttgtttatgcgtgttttaaaactatattttaattgaaaatatattaaattactattttttaataatgttaatgtgtttattttataaataaaaaaatatttatatatattttaagaaaaaaaataatattgatgtatgcacttaatttgacccagtcttgaagttttttagttggccgtattcaaagttttgactgtactctaggcctctcgcgacctagataaataattatctcacgtgattaatgaatatgtttaattgtttgattaattttgttttgaaaattgatttttatttaaaaatatattaaatattattatttttaaattatttatgatattaacccattaaaataatttaatttaaaataaaatataaaaatataatttttttgaaaccctgcgagaagaggggccataattgacaacgactggcaataaagcgaacgcgttgtaggtcatcccgtcgtcaacacggtttctttcttcactcaacggaaacgtggaagttggataaagataataaagaaaatcaagcttttttattcatcaaatattattggtgaccccaggcagtactgaaactgttcaagtaattgatgggctgatttttttttatattattaataaaataaaaaacagggtaaataattaaaatagtccgtttttattctcaaatttcagcaattattttttcttttctacgcatgttgttttacagtcaaatttctcgttcagatttttttctcagttatttttataggagaagccaatcgtttaaaattcacgattcattttgaatataaatacagtgcaaaagtgaggtaaattacgaaaatatcataaaataactcacaccatcaacaaatttaatatagaaccctttatataataataataataataataataataataataataataaaattgtatttttattaactttatagtcattttagaccggtatcctgcaaaaagaaatacattcgaagaaaaaaaatccactagtcgagtcactagttaagcggtgaggtgcaagttgcgacttcaaacacgcagagctttctgtaaaccttctgcaaacgttcaccatgtgttctggcattaaacgttaggtattgttttgaagtgcttgtttattaagcatggaaatcatttgctagcaacgtacgtaattttcataacagaagtttgttgcttcagtataggaataaaaatggctacctggttgaattctcacagtccccccctccccctcttttacaggttacgaaagcattgagggaagctggactggaatcatcgaatctcattgttggaattgatttcactaaaagcaatgaatggacaggtatgtgcaagtgaagtcatcctatcgtcgatttgtaccttaagcattgtgttcgactttatcggttattcaggaatttggattttgagacttccatgaagttgaaacaagtatccagctctgaaaaaccaatctttaaaaacctaaggaggcaatctaataatatagaagaatgattcaatcatatactaaggactggaatggttataacaaggctatttaaattatatcctcgtgttttctgttcctttgaaatggtttgtgttttggcttgtctctcatggatgtcaatgtgttggttttcatttaaaggccaagtctcattcaataaacgttgccttcatgccatcggagacacacctaatccatacgagaaagccatctctattattggaaagacgatggctccttttgatgaagacaacctcattccttgttttggctttggcgatggtaggttcagtccctggaagttgagttcttacaatgttgtttctagttttgccccttataattcagctgtcgaattgattgattgatttatttattatatctatacagccaccactcatgatcaagatgtgtttagctttcacagtgatcattcatcttgccatggttttgaagaagtcctggcatgctacaaaaagattgttccaaacttgcgactttcaggtttgctcttttattatttgatgctggaatttggtcttttatcaactccttagtttacttaattagaatgatggctgaacattacttctacaaagattcttgtgttttactcatttctcgagtcaaataaatcttcacaaatatatatgttttggttttaagggccaacttcgtatggaccggtgattgaggctgcaattgacattgtggacaaaagtaaaggtcaatatcatgtattgctcatcattgcagatggccaggtttgaaatttaaaatcctctctcctttcctgcatgcttgcatgtgtttgtttctgtatgtatggatgcatatgtaatcgaagtaatagtctcttttactgtgaaggtcactagaagtgtgaatacaggcgatggagaaatgagtccacaagaagagcaaacaatcagggcaattgttgatgcaaggtcgagtcttaaagataaatgcaaatcatttatacttgcttagactaactttcatagaaaatatatatcctatggtcatatgataactttcatctaattaaaatgacaaacttaggttcttattagaactattactttttagagcttctgttgttacatgacttgcctagatagatgtatatgacttgggcagctgcataaaaagaaggtggttaactgatggctgtctttatttattgagaagtgatcccatttagtgatgtcaagcacttgtaaaatatcaaatgaatcataaggggttaacaatctacttttaggtcctagtacgtatacagatttatattgcatcataaccagcttgttattcaattatttgtttttcatgccagcctgatattgcatttgtatgtgaaaaacactcggtccacacagaacataattttattgcaacgagtttacctgtttagtgtccgaacatgtcagtcaacctgtatcaacagtaaggggtgtaaagttgaatctgatgacatcaatcatcagattttaacaatgccagaaaatggtgtcgtgtttatactgaaatgtgttgccatttcttttatgaaaagctattacaatgtgtaaccttatgatattcttaaccagttcatacccgctttcaataattcttgttggagttggtgatggaccatgggaagacatgcagagatttgatgacaaaatcccagcacgtgaatttgacaattttcaggtatagtgataacaaaatgaatgttaagctcgaattccatccaacattctgatttaatttattatacatattagcactttatcaacatgtttctgtattgtgtgcagttcgttaatttcactgcaataatgtcaaaaaacacaactatctctgagaaagaaactgcttttgctctagctgctctgatggagattcccctccagtataaggcagctgacgagctttgtattatcgggtaggttgataaacttgtttattcactgctccacactaaagcattgccagcatttgaaaatttcaaaataaaaaaaaaccatcagcggtggagccaattctaaaactggtcagcaagtcttagttcaaatctgtgcataaataaaattggttggcctgtcctttcacttcgaatgagaaaacaacaatcgaagggtttccatttttacgtttcccggcatcctaatgcactgaccatttttttcctgcataccatccacttgttcttacgtgttgtctcgtacattcaaatggctttcggagaaaagacgttctttgggacgagcaaggacagtagtaccacgccctcctccagttccgtattcccgtcgtccagtgctagatcgcgaaccatcccatgtttcttctccggtcctcgatgaaagaacccaggtttgaaaataatctcgtgtaattctgtctttttgtctggaacattgtagctcgtcgataatttataactttgaaatatttgttttccaatcttccattttgattacaggcctgccctatttgcctgactaatggaaaggacttggcctttggctgtgggcacatggtgagctgccacctaaacattgccaactttgtttttttagtgattgattaagaacgtgtttacagttgttattaaaaatatatttttttagaaatatcaaaataatattttttttattttttaaaaattatttctaatatgaacatgaaaatgatttaaatagactattttttttaatttaaaattatttttttcaaaattatttttcaaatacagtgtcaaatactaatacctgttgctgggttgtagacctgtagaaactgtggacagagagtatccaattgcccaatctgccgccagccgatcaccagtcgtatcaggctgtatgcttaa

SEQ ID NO: 26 - protein, 339 aa, Salix sp.
MGHRCCNKQKVRRGLWSPEEDEKLVEYITTRDHGSWSSVPKSAGLKRCGKSCRLRWLNYLRPELKRGSFSALEEQVIIDVHRILGNRWAQISKHLPGRTDNEVKNFWNSRLKKKLMAQGLDPKTHNLIPTRQRAANYKVACSISPSNHEPFSITSHDSKMKDVSLEINPPVLTIVSPNYPSNCSIQPPFFQTTTSLPLPKSCYDNPSVVWNVNSQNSYDSSLFTCVSSIENSLASSSSSSSANPTGFGLVDENCFWSCSNIVEPFEAAKIFESVPPQDQENQLNKVCDTQIMGKNKGVHDNMEASFDTSSYDLGLVDSTLFPGSMCHDLSSMDDLAWNF

SEQ ID NO: 27 - protein, 350 aa, Salix sp.
MSSHTASSSNGGNGSGDSGVPKRNSKRPKYSKFTQQELPACKPILTPRWVVSTFMLIAIVFIPIGIACLIGSRDVVEVVERYETKCIPVLNRTNKVQFIQSDADKTCTISMTIPKRMKQPIYVYYQLDNFYQNHRRYVKSRSDEQLKSASKENDTSACKPEDIANGRGAIVPCGLIAWSLFNDTYSFSRQNQSLTVNKKGIAWKSDKQKRFGKNVFPKNFQGGGLVGGATLNESIPLNEQEDLMVWMRTAALPTFRKLYGKIEVDLEEKEVINVTLMNYYNTYSFNGKKKLVLSTTSWIGGRNDFLGIAYLTVGMISFALSMGFTIVYFVKPRRLGDPTFLSWNRGPGSH

SEQ ID NO: 28 - protein, 536 aa, Salix sp.
MTLGRIALARIPATRGTIHRLFSTTLSSSSKNRTSPPLSRHMSMKSDNLVSKLTSSGLLKTQGLIDGKWVDAHDGDTIKVLNPATGEVVANVPCMGQSETNDAISSAYDAFRSWSKLTASERSQRLRKWYDLLISHKEELGQLITLEQGKPLKEAMGEVIYGASFIEFYAEEAKRVYGDIIPSTLGDRRLFVLKQPVGVVGAITPWNFPLAMITRKVGPALACGCTVIVKPSELTPLTALAAAELALQAGIPPGVLNVVMGKASDIGDALLASPEVRKITFTGSTAVGKKLMAGAAGTVKRLSLELGGNAPCIVFDDADLDVAVKGSLAAKFRNSGQTCVCANRIIVQEGIYDKFADAFSKAVQSMQVGDGFSEGVMQGPLINEAAVQKVESFVEDAIFKGAKVLLGGKRHSLGMTFYEPTVISDVTEAMLLSREEVFGPVAPLLRFKTEEEAILMANNTKAGLAAYIFTNNVQRSWRVTEALEYGLVGVNEGLISTEVAPFGGLKQSGLGREGSKYGMDEYLEMKYVCLGDMNRK

SEQ ID NO: 29 - protein, 353 aa, Salix sp.
MFHTKKPSTMNSHDRPMCVQGDSGLVLTTDPKPRLRWTVELHERFVDAVAQLGGPDKATPKTIMRVMGVKGLTLYHLKSHLQKFRLGKQPHKDFNDHSIKDGSALDLQRSSASSSGMMSRSMNEMQMEVQRRLHEQLEVQRHLQLRTEAQGKYIQSLLEKACQTLAGDQNLASVSYKGMGNHGISDMGGMKEFGTLNFPAFQDLNIYGGDQLDLQHNMDRPSLDHGFMPNNDNICLGKKRPSPYGGSGKSPLIWSDDLRLQDLGSAPACLEPHDDPFKGDQIQMAPPSMDRGTDLDSMSDIYEIKPSHQGDALDEKKFEASAKLKRPSPRRAERMSPMINTGGMPQGRNSPFG

SEQ ID NO: 30 - protein, 381 aa, Salix sp.
MGSRARRKQRWCAQTLTPLLEGPDPDMQEEGNKKESSWEVIREWFRLQKGLSAGNNFSVPLYGSIPVKRQDLRLLLGVLGCPLAPIPLVNDPIHRIHIKNTPIENSAAHYIIQQYLAATGCLKQQKCMKNMYSTGSVKMIRCETEISSGKNVKSLGTRSGENGCFVLWQMLPGMWSLELVVGENKVIAGSDGKTVWRHTPWLGTHAAKGPQRPLRRIIQGLDPKCTANLFAKAQCLGEKTIGEDDCFVLKVAADREAVMERSEGPAEVLRHVLYGYFCQKSGLLMYLEDSHLTRVQTPENETIYWETTIGSSIGDYRDVDGVLIAHQGRSIATVFRFEEVSVQHSRTRMEEVWRIDDVVFNVPGLSMDYFIPPADIFDASP

SEQ ID NO: 31 - protein, 381 aa, Salix sp.; identical to SEQ ID NO: 30

SEQ ID NO: 32 - protein, 512 aa, Salix sp.
MADSTPLLLSRSESSNESKQPPPSLDETIEHCIGEFGVAQLFQAILVSFAWVFDAQQTFISVFTDAEPTWHCTSDSCTSASDICRLPQNSWAWDNPNDTSIISEWGLQCASSIIRGLPASSFFMGCLIGGLMLATLADSMLGRKNLLFLSCLVMSFSGSFTIFSNNIWTYSALKFVNGFGRATIGTCALVLSTELVGKRWRSQVGVIGFFCFTLGFLTLPAFAYVNRGSSWRNLYLWTSVPTIFYSISVHFLVRESPRWLFVRGRKDEAVSILKSIATAGSSGILMSFSNLELRKESWNVDTYSAIKILLKKKWACRRLLTVMAVVFGIGLVYYGMPLGLANLSFNLYLSVTFNALSELPASLVTFFLVDKLNRKDSLLVFTTLSGVCSILSVVTGERSANLQMGLELVSFFSACTAFNISLIYTLELFPTCVRNSAISMARQSLVFGGMFSPVLVAAGSRNRFLSYGIFGMVIGICGLFVICLPETRGKTICDTMDEEEYNSTKIDLPVVG

SEQ ID NO: 33 - protein, 512 aa, Salix sp.
MADSTPLLLSRSESSNESKQPPPSLDETIEHCIGEFGVAQLFQAILVSFAWVFDAQQTFISVFTDAEPTWHCTSDSCTSASAICRLPQNSWAWDNPNDTSIISEWGLQCASSIIRGLPASSFFMGCLIGGLMLATLADSMLGRKNLLFLSCLVMSFSGSFTIFSNNIWTYSALKFVNGFGRATIGTCALVLSTELVGKRWRSQVGVIGFFCFTLGFLTLPAFAYVNRGSSWRNLYLWTSVPTIFYSISVHFLVRESPRWLFVRGRKDEAVSILKSIATAGSSGILMSFSNLELRKESWNVDTYSAIKILLKKKWACRRLLTVMAVVFGIGLVYYGMPLGLANLSFNLYLSVTFNALSELPASLVTFFLVDKLNRKDSLLVFTTLSGVCSILSVVTGERSANLQMGLELVSFFSACTAFNISLIYTLELFPTCVRNSAISMARQSLVFGGMFSPVLVAAGSRNRFLSYGIFGMVIGICGLFVICLPETRGKTICDTMDEEEYNSTKIDLPVVG

SEQ ID NO: 34 - protein, 332 aa, Salix sp.
MAPVSLPPGFRFHPTDEELVVYYLDRKINGRTVELEIIPEVDLYKCEPWDLPEKSFLPSKDLEWYFLSPRDKKYPNGSRTNRATKAGYWKATGKDRPVSSQKRPVGMKKTLVYYRGRAPHGIRTNWVMHEYRLIDSSLCGAASSSLKDSYALCRVFKKTIHIPKPKEEENNGNDKEKDAAAVSSEVQLLGDDTVSGIESSKGRDNADHRDENFNNGYCKFPSETSSSDVTQGTPIETAMPDDLQPPFPSDEAISSASLYSMGVDFSSNLIQDMQMPNCSSLQYQFPFPPLELKDFPQIGFTDGMEPSKPEIIDDYMMYRDCMNGIFEENFYL

SEQ ID NO: 35 - protein, 332 aa, Salix sp.
MAPVSLPPGFRFHPTDEELVVYYLDRKINGRTVELEIIPEVDLYKCEPWDLPEKSFLPSKDLEWYFLSPRDKKYPNGSRTNRATKAGYWKATGKDRPVSSQKRPVGMKKTLVYYRGRAPHGIRTNWVMHEYRLIDSSLCGGASSSLKDSYALCRVFKKTIHIPKPKQEENNGNDQEKDAAAVSSEVQLLGDDTVSGIESSKGRDNAAYQDENFNNGCCKFPSETSSSDVTQGTPIETAMPDDLQPPFPSDEAISSASLYSMGVDFPSNLIQDVQMPNWSSLQYQFPFPPLELKDFPQIGFTDGMEPSKPEIIDDYMMYRDCMNGIFEENFYV

SEQ ID NO: 36 - protein, 130 aa, Salix sp.
MSILWEKSEAWRWIVRKTRDSKPFFFTFATVCGVVPGVIGYFVMQTTNSSNPELEARLRQNARPDSLMMGRVNRERLAEYLGELQRKEDTNDRYVAALRGETFTRNPYVRIQPIPKQNSTEADDQKKQIV

SEQ ID NO: 37 - protein, 130 aa, Salix sp.
MSILWEKSEAWRWVVRKTRDSKPFFFTFATVCGVVPGVIGYFVMQTTNSSNPELEAHLRQNARPDSLMIGRVNRERLAEYLGELQRKEDTNDRYVAALRGETFTRNPYVRIQPIPKQNSTEADDQKKQIV

SEQ ID NO: 38 - protein, 390 aa, Salix sp.
MSSEPPSSLCNTASATGGDSKSQAKAGSKLDKKQSIKQKYSFIPDNFTSLEQVTKALREAGLESSNLIVGIDFTKSNEWTGQVSFNKRCLHAIGDTPNPYEKAISIIGKTMAPFDEDNLIPCFGFGDATTHDQEVFSFHSDHSSCHGFEEVLACYKKIVPNLRLSGPTSYGPVIEAAIDIVDKSKGQYHVLLIIADGQVTRSVNTGDGEMSPQEEQTIRAIVDASSYPLSIILVGVGDGPWEDMQRFDDKIPAREFDNFQFVNFTAIMSKNTTISEKETAFALAALMEIPLQYKAADELCIIGRSLGRARTVVPRPPPVPYSRRPVLDREPSHVSSPVLDERTQACPICLTNGKDLAFGCGHMTCRDCGQRVSNCPICRQPITSRIRLYA

SEQ ID NO: 39 - protein, 390 aa, Salix sp.
MSSEPPSSLCNTASATGGDSKSQAKAGSKLDKKQSIKQKYSFIPDNYSSLEQVTKALREAGLESSNLIVGIDFTKSNEWTGQVSFNKRCLHAIGDTPNPYEKAISIIGKTMAPFDEDNLIPCFGFGDATTHDQDVFSFHSDHSSCHGFEEVLACYKKIVPNLRLSGLTSYGPVIEAAIDIVDKSKGQYHVLLIIADGQVTRSVNTGDGEMSPQEEQTIRAIVDASSYPLSIILVGVGDGPWEDMQRFDDKIPAREFDNFQFVNFTAIMSKNTTISEKETAFALAALMEIPLQYKAADELCIIGRSLGRARTVVPRPPPVPYSRRPVLDREPSHVSSPVLDERTQACPICLTNGKDLAFGCGHMTCRNCGQRVSNCPICRQPITSRIRLYA

SEQ ID NO: 40 - DNA, 196118 bp, Populus sp.
  misc_feature (54957)..(55006): n is a, c, g, or t
  misc_feature (57716)..(58704): n is a, c, g, or t
  misc_feature (60256)..(60305): n is a, c, g, or t
  misc_feature (62709)..(63843): n is a, c, g, or t
  misc_feature (64552)..(164551): n is a, c, g, or t
ttagtgcgatccaggacctctgttccatgataagaaggtaggatcaccaagccgcctgagatgacacagtaaagagaaacagtaagaaaatattaacatatatctcacaaacaatcgaatacacatagcatatgaaaattttatgctgccgactatggggccatgctccacaagtcagagcctcactccatatatgatgctgggcacacttccaaatcctcaccataaaatgcaagccttatgaagggcaattctaacagcctcactctttcaaaagccgtgacgccgcacacttgtgacagcgtgcattttgactttaataaccagtttattaaagtcacgagaactaggctcctaaattcaagaattaatttgtatctatgatcaacttacctaggcttgacaaaatacacaattgtgaaacccattgacaaggcgaagcatatcatcccaacagtgagataagcaatgccaagaaagtcatttcttccaccaatccagcttgtagttgaaagcacaagtttcttcttgccattaaaactgtatgtgttatagttgttacccagtgtaacatttatgacttcttttgcatcaagatccacctctatcttcccatacaactttctaaaagttggcagagctgcagttcgcatccaaaccatgaggtcctcctgatcgctcagctgttacacaaaatcatataagaccaggtcagtcacataccaattacttgaagcaatttgcatagaaagaaacacggagaaaaatttatggttctctagtatattttcacgttttagcaatagaagaggggaaatgacacgcaacaatatctcatcattttaagcatttacaccaagtctctcacgtctccaaggtataagcctaatactcaacaccttgggtttaaaaaatcaactccttcatgaatgaaagaataactgaggtcacatcttcaatactaatcctgaagttgaggttaagcaacctgaaaataccactctaataacacaacagcaacgcagttttgaaatctaccaatgtccagagtgttattaacattattaaagcctctaaaggtattttccaggatgaagttagaacagttatttaattagttatttagttagtgataagatgagttgcttatatattaatttgaagtaatagtaaagggaggcttacacgtgttaatggatcgagccttgcaccacctacaagacctccaccctgaaagtttttaggaaagacatctttaccaaaccttttctccttatcactcttccaagcaattcccttcttattcactgtcaacgactggttcaggcgggagaagctataggtatcattaaacaaactccaagctatcagaccacagggtacaattgcccccctccccgttgcagtatcttctggctcacaagaacttgtatcattctctttactcgcacttttcaactgttcatcacttcggctcttcacatacctgatttattagagcaatcattaaaattatgccaaataatcaccacataaactcaattacatgtgcttcaactttcagtgagtaagcatcccagtttatgatcatgataatcatgacagtttcacactgttcaatagtttttataaaatgatgggttgctttcattattaaacacttgaaagaatgtaattttctaccatcaacaaatagtcaaacacactattctgagatgagaaacatgatattaaccaccaattaagcatgcatagaggagccctttcctcaacgtgtaacaacatcctaggtcctaggctgtaacgtctgtaattcttgaaaatcacaaacatcgccatcttgacttataaaatgtggcaggaaaatctaaaagggtgcacttcctgaaccacatgttataattggttctctggaccatcacctatgatctacataaattacgcgcctggatagtcctgaatatcaatgctcccaatttatatgaacaatatacctctgaccattatgtaaaaatctacacatgattacttgaacccatcagaaattatatgctgatagagtacatgaagttgatgacatacctacgatgattctggtagaagttgtcaagctgatagtaaacataaataggttgcttcatacgcttagggatctggcaagaaaaacaagagttgagaacagaagatcgttatttactgcttaacctcaggtcatgatggctaatttctataattagcataagtcatgttgcatgcgagaaaaagatattggcatgggttttttgtaaggagtagcataaagtaacctactggctactaatacactgctgatatagcaccacttacagctctgacaaaaagggaatgccaccagtgaacagataacaataacatgaaggtatattgtataacagaaaataatattggcatgggtctttccttgttagcttataaatccacaaacactgctaataaagaacatagaaaatgacaacaacacatcaaccataataattgcaagaacaggacttaccgtcattgatattgtgcatgttttatcagcagcgctttgtataaattggacttcattgcctctatttccaaccggaatgcattctgtttcataccgtttaacaacttcaacaacctgataaaaggaggataacccataaaaaaccataggtggaaatataactagaattgcaaggatttaggtgacactagagctcacatctcgggaaccaagcaagcaagcaatgccgatagggatgaagacaatggcaacaagcatgaatgcagacactacctgcacaaagagatatattaggagttaataactttgagcactcatttgcatcagacgaaaccagataaaaagaatgataaaaacttacccatcgtggtgtgagaattggcttgcaagcaggaagttcttgttgagtaaactttgaatctgaaagaaaacgaaacatttttagttccataaaaatcacatgtacacccattacccatatgtgctcgtgtagtgaaaaacaatttgtgagctgtgattgaaacatcagataaagaagctgctcagctgtgctctctctatttttacttttcttgttttttttaacagctacactacaataagattacaagtgcattttaataaaatgaccaaaaatcgcagattttttgctctggcaaatacaatacatccctataaatttaaaatgttttcatccatctatcttgctttgcaggataacaattacgcagtcaggcaactattctgaacactggaaaacattctgttttcaatcttactgtagatcacatgagcatacatgcttagacttagatgcatgtaatgataatacagccaaaattactaaaattcttattcgtgtaatggaaaaatgtccaattatctcatggcatgttatagctgagtttcattaatatcttgtttatcaaacccaatttagttcattttattgctaacaaagtttaatagccgtatttctctttcaaaaggggaatttccaaatatatcttgatgaggaattaaaaaaaccaggtaaggctattccaaaaacggaaagactaaatgatcaatataaagaaaattagattcttaatatgaaacaaaataatcaaaaaagagctcacacgaccactctcatgcaacaaaaccaacagcgaatcaaaataacaagaacccatcaaaaatatgcataaacctccacatggatgcctataaaacccactagtgatcccaaaaacattcaaatacctgagtctctgaaacaaactaagcaagaaaattaggacagggttcaaaactttgcaatttaaaaacacaactaacaccatgatcacaagagggcagacatgaatttgcccaaaatagaaaaaaaaaaaaaaacgagaagtaaagaagagaatcacatttgggtcgctttgaattccttcttggagcaccagaatcacccgatccgttgcctccattactggaggatgccgtgtggctactcatgattgtgttaaaagatgcaagcaagcaagcaagcaaacaaacaaacacttgtagtttctgtctctctttctttctctgaaaaaaacaccaaaacaaccgaagaaagaaaaaccttaacagagaaagagagaaagttcagaaagaaagaaatggtggaaaagactgtgtgatcaaagaaagagatggactttttaaaggctaagcaacagagaggggaaatataaataaataaattttctagagagtcgcagtatatggttgaattgaatctgcaagtttttgtttgacttcagaaactgaagaggatgtttccttattttctctcactagacatgatgagccctcggaaattcctccctttctagaaggtgagtttgtagagagagagggggaagcaaataaaaaaatgatagctttattctagacccttaagattcgaaaatgtttcatgtaggtcctcatcgtcaccaacctaaggttcagaagctttcaatatcatctgtaaataggtattagctggcaatgaacattttcgaagccacgttgagttgagggacttctcaaaaatcgctataattacatataaaaacattgtagggttatatgtaattgaccctttaattgaaaaatccatagaagagggttaaatttatagtttttttcaaaaaaaaaattatgtataatattacagcggctaaattgattaaaaacaaacataccattccttttttaaaaaaatgcaatcaatttatttgatggtgttcagtaggaaagtaattatttttaaagtattttttatctaaattaaaataatatttttaatataaatgtattaaaataattttaaaatattaaaaataattaatttaaagtgagaaaatttattttttaaaaaaatacggtagcactataaaaataaatactacctttctactgtacattattttttttatatctaatttaatttttttaaaaaaaccctttcctcgtttaacttttattttccttctttttttgtgtgtatttttttttttaagaatcttgacatgatattacttagatccaaattttcaatggatcataaaatcaaaataaactcaactagattattttgtttgtagtttgattttttttagtgttttgagatctcatttaatttttctaaataatttaaaaaacaattaaaataacgaactgtaagtttaagttttttaattgactatagtgagaataattggtgactgatttttttttaggacttcgtggttgttgttttggaggtttttatgagtggaaaaaagcttcttattctgatgggactagaaaaatctcagctcgtcggaaatggcacaggaaaaatcttcactgctatctgttaattattactattaatcataactttttagactttaattttcagattgaaaggtcaaattccacccggatagtgcacagagtggaaagcacggtgccttgctggacgggctttgtgggaattcgggatgaccatggacagcacactagtagagtcgtataataactaaatattattaatatagtatattgatgttttacacgttcaatttttccatccagattaaaatgccaattgtttaattctttcttttttgctaaaacaattatttacttattagagttgtataataactaagtattattaatatagcataatattattttaaaaaaaattctgttgagtgttaggccctcacgaatgaagttttctaaaaaaaattaaaaaaatttattgttttgatatactaatcaaaaataatttttttaaaataaaaaatactattttaatatatttttaagctaaaaatatttttaaaaacaaataatatttttatatttttatcaacgatggtactgtttttttttcgttttctatggcctccagggttgaacttgaacgtttccaggatcatagagaagtccactcatagtttgaataatcttctacaacggcatgtaataagatatatttttattattatatattccacgcgatatgttcagctggctgctttccaaagccctgtttctttgttagctacgaaaaaaaaatattgatatttagacaaaattaaacaaactagtaatgtccacatgcactgggatttaaataataggtatttgttaggtcattgttttcactacagtgacgtttaatcgcccgcgcgagctgcttaatattgtaatggaattagtagtgtaaatgcgagttatttattaagctgtgctttcaatctaacgatgaagaaaaactcattcaatataagaattttaggtttgaatctcgccactgtattctaaaaattataatatgtatgctcagttaatagccgtaacgttccatctgaagtttttaaaaattttgatttttttattttaaataattttttatgtttttcttttgttattttgatgtgtcgttgttgataatcaactttaaaaaataaaaaaataaaaaatttattttgatatatttacacacaaataatattttaaaaaataattgttattatcatttcaaacacgtagcgtattgtaatttattgggattgaatttttatatcgtgaaggagttcttccggtaaaccagatctgataacgcaacaaatttaaaacctttgcaagtttcttttaacaaattataagattttattgttgttgttgttattggtcatttacaagagaattttatccattaaagtcggccagcatatgtttgcagtcaagcgattgaaactttataataaaacacacacgtgaagtttggcgatggccgcccttcataaatttacaaagacgagagagggatgcagctagcaagcccgtattgaattacaacttgcaatccgagctgtagccacttttagatgccaaaatactggaggcaatcgacgccccctgggaggaattacctccactgttctagctgggttatctaatttcaaagtaattaaaatcaaaatctgtagtcaaaatatatttgcctctgttattaacattaatttcattttcttgtatcaggtaatgaatgaattcgtaacctatcactgcttatccacccacaaatatacacatcacgagctccaaattccagtgtgtttcgaatcctcgttagaaaaagtcaagcgatgccgtaaatactctcgatggtcctgcttatttatttcttactcgatctctcatctcatcgcatgttactagaggaaattaatagcctccatgcacagtttggtacgtcaatgccgatgattgtcaacgccatcgtgggcagtatcatcatggaattctgttgcattctattatatcatttattaaaaaatattattttaatatatttctaaataaaaaatacttttaaaaataataattctttccacacggtgaattaatatttttaattcagagaaatatcgcgtcgattttgccaatccctccattgcagactcggaatgctagagtcgcccggtgaaattaaaagaccaattatcttgactgttaataggaattttattggagaaatttccatgttagtcaaacatctatgtgcggaagaccacgttatgttcatatagatgaactatacgtggagcacagagtcaaaaggattttccatccgttgggaaatagctacgattaacattagaccaggagagaataataaactgggttaattaaatatacttaaaagagggtgaaaaaaatcatcctcgccatacaatcatgcctgtgatcacatgaaagtcacggtcatccattaattccactgtcagtgccaccattgttgccatcaatcggttgcttacataccaatagagaggcctgcgttgatttgcccagattgtttttatttgctatcggggttgatttgttagacgaagcctgcgttgccgagtatatttagagtgactgtggctgttgatgatcatttgcatgaattaatatacagaagttgataaattcgtgagcaattataacttcttttaatcagatccatttattgaactcaatatatctgatatacgccatttaccatgtatgattattttcaggtttttgtatgtatatatattttttatgagctaactattaatagttattctattagaatattagtaggttatttatcttcgttaaaaaaatattcaagcattatcaacgtgattttaaaaataaaaaaaaattatatagagattgatctaatataacttagtcaacttgaaaaaaaaaacataatttaattgaaaaaaactttaaagtgatatcttttaaaaaaaatattaagatttgaatcggcttaagtcaacccatgtgaacatgtaaaatctatgattcgaatcatgagatcgtaataatatcatgaagagcaaattaaaaaaaaaacatattgaaatacaattcttaatcaactcaatgttgaataatgaaattaaaaaaaaaattaattaaaaaataacaaaaaaatctgagtcaactcaagttaacctgtatcatgagaccaaaataacctaataaaaaacaaatcaaaacaaattataaaattcaattctcaatcaatctatgttgaaaaatgtagttgaataaaaaacaattaaaaaaacaaaaaaaacctaagtcaatctagtttaactcaccaaatccttgactcgggtcataacaccatgataacctcatgaaaaacaatcaaaaaataagtatgaagcttaatttcctatcaattcaaataataaatgatgagattgaaaaaaaattatattacaaaaaataaaaataaaaactcgagtcaattgctttaactcacaaaacttataattatattaaaataacattataaaaaataaattgaagtaatgaagatcaatcactaatatctataatattaaaaaaaaattataattcatgaggaagaggactgtaatttcccttcttcaatcatctctaggtgattaaaataatttttcaattttatccatacttcttatgtgtcaagatttccttcgcgcaaacagatgatttgtctccaaaaatcccgcagttgcagcatttgccagattgcggttcggtgaatttataataaagaatcaagcacaactccattgacagcatttgccagattgcgggtcggagaagttaataaagaatcaagcacaactccattgacagcatttgccagattgcgggtcggagaagttaataaagaatcaagcacaactccattgaccgtctttcatagacatgatttggtattttgctctgaaccaattacgagtctaataattatatgcttggataaaggaagggacgagtggtttgatacatggtgtctcgttttctctatctcaacggtcccttcagtatgtatgggaaaaaaagcagatcattttatttttcctttttaaaaacagctgtttccttgatttgacgtggtctctctcctgtcttgaaattaatataattgagggtgattagtagtgttacctgaaaaaaaaaaaacctttctctaatctctacgatgaacacgaagctttcttctgccatgaaacttgatagatgtttttgagccaagcaaattatgctttatatgaagtttttgatcacttggattctattcctgttgtctcagctgtgcgtgcaataactatttgttctgatctagaaatcatgcaactgttaatgagaattacactgcctccattcattcattaattgcaatttctgtgattaacagaacaggctgttataagaggaaaatatggcgaacaaggatgcaatgttggcgaagatggtggtttttctccgaacacatatgatgcttaaccttgtctttgaaaattccgtgacctctccccatctgcaaatcaccctccaaaaataaatctccgaggatatgagtgacaggagaatgaaaatagatgcacagctgatagacaactactgtatcttttctccaggatagctataatctgctgtgtccgcccccttaaagagagctatgtatattcaaaattcatgcgaggttcttgtttaatcatatccattggcagtttccaagaaggcttggatctagttaaagaggccatcaacagaacaaggtacaacgagagaataaagatgaccactgatccatggtgtcgtcgcctagcggtgataaagttagctgagcacgtttttaagttcagaatccattctgggatacttacttttggaccccatttatgattcgatttgcagagcagttctaaatttatttattttcttatttttcatatctttgttaataattttggatctcaagttgattttattttctggtatggcctttgatgaaaaaggacaaactatttatactatttgtacgtaatttttttggccattattattaaaaaaatcagaaatctagtctcgagagttttcttatagttctactctgttttctttttgaagattttaaagtacaaacaaatcccatgttcttcattgtacgcagacacgtcgtaacattgttgaagctcttaacatcatccagattaccatagttagggcatctcaagcaaagatgatattttaaagtgatattttaaataatataaatatattttttattattatatatattttaatagaaaaaagctatttaaaaagctaattgtataaaaattaaaaaaaaaatactttattttttaatgaatttgatgtttaatgtcatctttttttatatggctgcatttaattgggtttttttttttgttggtctttttttttatttttttaaaagacatgtaagaatatattttttgaagagaaaatgcattttctcattttatttattagcactcctttagagcacatgtaagacaattatgaaaaaaccaaattaatatatctttatttttttattttcatttatcacaacccatggaattgctcttactggccacgatagcaatacctacccactctcctttctatgcaaaggatacgtcataattactaatttttacctcatccattgctggggttccaaagctaaaaggtggattaattcttgtgatttgtgttaaaaagaaaaagaaaaatatattgtcgaatactttatcgtggtagtattttgggaccccaaaatttaatgtttctctctcgactatttccaagaagttttgtctttatcttcaaccaattaccacttcgtgcgcgataatggcgacttgtgcaccaacacttttttctaaaaagtttaattttattttctgattatcttttattcataaaaatcaaatttctcatcgaggaaatcttaagcgtgttgttcacactgctgtgtgtgtgtgtgtgtgtgtatcatacaatttctattttttttttgtacagagcaattagacttgtactcttgtgtgtatccaggggcggaaccagggaaggcaagcaggcccgatccctataaaatattttaaattttttttttatttaatattttattatttaaataaataaattttttaataatatatattattatattaattttagccttccctgtaaaataaacctagctacgcccctgtgtgtatcgattgaactttttctttcacactacaatcagaatattaaaacacgcatcaagtcgtccaacagtcattgattctaaaaaaagaaacgaagaaattgtcctgtaatttcgatcgagaattggaaagttcttgctcatgtaccaaatggagtgcaccctccatattttgccggagtggccgaaccagccatccattaatggctaagtgccttgagagagacacgattttcactttatatagcatcagtactcgtgtggataatacgctcttcatttcttactgcccaactcttgttatgtaattctgcgttgcgtgttatagtttctttgacctgaataacagtattcttgtggatttccctagacaaaagcaatagtgattaacaatagggtgttacagtctaattatattttaaaaacatttaaatttttataggttttggatcattttgatgcactgattttaaaaaataattttaaaaaattaaaaaaatatcattttaatatattttaacataaaaaatatttttaaaaacaactattatcaccctcccaatttaaacttaatccagcccgccatttctaggctgcttcaatgtacaccgggccttgattttatcgagctttgaatggtcaagaacaaagggtggagccattgattgaaattagctccgaagacatgcggttcatgaacaagacaggaccgatttaataattttcataactaattcattgtctgataggcattgtagtgtttgtgctttcaagacaaagtgaacctattatgaattatgattgtaaaaataataaaagattcaaggtgaaaacattatttatatgaataataaactatttttttaatatatttttttattggaattttttcgtcgaatccttttactttttatctaacaatcttagtttggttttacagaatatatactcggtaaactatgaagtagtgttttaattgtgaatggtgaactatctcaaactttttaatttattataatttattagtatatataattttggtttattttttaaaaaagcacatgaaaactttttaatttaccattgaagttttattaacagtaaaacagaaaccatagcaaacatttacaccacttttttgcgttgaaaaaaaaaaaaccccaccattgcattaggaataaagaggtgtttgggggtgtagtaatattattttttcaaggtattttttctataaaatatatttttaaatttttaaaaattatttctaatatcaatatattaaaataatttggaaacaaaaaaaattaatttgagacaaggaaaaacaattaatttttttcaaaaatatttttaaaatacagaaagaaataaagctaatatcattgataatatctaagatttttattgaaaccgcgtgtgtgtgtaatagagtaaattatagattagtttctctaattttgaaaaataaattaaatagctcttctagatttagaaactagctcattagtctgtttgttttaaaatatatttgtaaattaatttttcatgcatttcatgttttttatttttttataatttaaaaaacaactagctaatacggaaagattaacgagaaaataagattttatttacaattaagtaacattaaattaagaatcatcaacaccggttaggagtctagttaattaaaactaaattaatatttaattaattcttcaaagctagaagcctagaaaaactagtttatgatattcatttaatttatccctttcaacttaataactactcctatatatatataacacataagtagcacgtgggattaataaattatttattagtatgaacattttaatcatcaaataaaaaaatattgataacatatacttattaaaatatttttagtacgttaaaggctcgcaacagcaccgattcacgataatatttttagtatggctatttatttttagacccgcgcagtgtttatcattacatttttttaaaaaaaatcaggatttgactgcacacgcaaactttgttcactgtggattgaaggtgaaatgacgagtttgccatttaaaaataaaattatttgaagtcaatacaatatttttacattattcattaattattgccagattaatcgagtacatcttaatcttttcatatttttcaagcaatgtaaaatgactatatttctgttgcaagcaaaatatattcagttcgtttgtaagagttttttcatgcttttacttttttaaaagcatgataaaataattaaattattcttgtgaaagtaaaaattttctaactagtgtctacgttttttttttttgttttttttttcacttttgagttttagttatatttgatttaactatgaggtaatttgatatattaataaatataaaatataatttaaaaataaaacaggcttgtgtgtgcgtttaaattatccttacaaacaaaaaatctctaactagtgtccatggtgtttttgtattttcactttaaattttaactatatttaatttaactatgagatactttgatattttaataaatataaaatataattaaaaaaacaggtttgtgcgtgtgctagtaggtgggctacaatcaagcttttcaaaagatacacgaggcatttcataacaaccaaagactaccttccacaacaatattgaaaacatcttaacgactctctattcttaggcatatatacgtggcttaatgatctttgttttagcgctaacaaccttttttttatttattattctctaattttttctttgaattccatgcagagccctcctaattttacagacaacccttcaaattgtttttttttttttttttgtatttggtcccaattattttaattaccatgtgttttatttaaaatgatttagatttagaattattttcaatttcgtcctctattttcttcatattatggtctccatcatttgattgttgtttgtttattttatatatttttaaaaattaatttattttatgttttgatattccattttttatattagttttgattctaattctcttgagtgtttttttaactttaataatttttttaaattgattttatttttgattttatcattcaatattaaattagtcgagaattgagttttttggttgagttcgggtttaggatctcatgggtcacgacatgaaagattaacatggtttaagagatttgtttgagttttgttgtttttttatttttcaagtttttattttttttagttttatcatttaacatttatttaactaaagactgggctccattattattttttatttgttttttacaggttttttcactaattttaaaaaaggtttggttatctcatgtcgagtctttttatttattattttttgttaaatctagcccttttttttataagaaatcttgtttttaattaaattaattaattagatataaacattaaatatctacttcatgatattttatctaatttgctttataaatcattactctaacaatatatacaatatccaatatctctcaatgttattgtgtagatttttgttgtggcatcataattgtttgagctatttttaatgatagggtgatatcgacgacaaagcgataataagtttttatttttttctgtatgatatttactgtttatttttctgttaattttttttaattatattattaaattagaatatcttgaaattatactatttatttaattttgcctgaactttttttttctcttcaatttagaaaaaatctgtaactgtacgtggcgaagcgcgtgcacatccaaataggctccaaactagcacttcccttctcattataagtgtcagcagccccctctactgtgaatcgcttgtggctacaaggaaggaaatcattgaaaaagacgaggaaaaaatgacgttagggagaatagctctggcacgcatcccggcgactaggtgcaaaatacacagtctcttctctgctccacactcgtcttcttccacgaatcgcacctctcctccactatctcgccacgtaaccgctactcatcttcttttacttgcgcataagcatcaatagctttcatccttgtgttgctaattgaatacagcgatcgcgattttgaattatctaaattttgtttaattcatgttttaatcgcttagaaataagtagtattttagtaattactggttcaattgataaataatttgtttcattaatgttcaatgtaagtataatctctgtttgaatgtatttttgttttctggtattgttagttgcgaattcagctaggtttaaaatttgttaatgtttttatggcagatgagcatgaagagtgaaaatctggtttcgaagctaactagttctggtctattaaagacccagggtcttatcgatggaaaatgggttgatgcaaatgatggtgacactattaaggtctgccattattgtgcgtgtgtttgtttgtaattttgctctactgcggctactagttttgggtattgtttctttctttgtcacacaagacatcacatgtatgtgttcttttcatggaatgacaggttctcaatccggccacgggtgaagttgtagctattgtcccatgcatgggccagagcgagacgaataatgctatatcatctgcctatgatgcatttagatgtaagaaacttcacactgaaccaacctaacgttcagtaaaatgtatttatgctagttaaccttctcctactggcgctatcatttcctaagttttgaattttgttagaggaatatggtttattttgcatgcgaggattatctttcagtagtaatagggggaattgctagtagaggattggtcatggaagtgcagttattgctgtgctgtctttgtaggttagaatccatgctttcagaaggtaatggcacttggatgtctcttttacagtatgtcaaccttattactgaattggagagcatatatacgtttttttctgaactcatgtgacaccatcttggttattcctttcaaagagtttggatttcatgacaattgggtgaagtcttattttactacatcaatccactattattcttttcaattgacctgcaactcgcacctgctttatagcccgcaccacgtaactaactgctacaatacattaaatacttcaactcatactcaaacgcttgtggtatttatgataataatcactgtaaacatgcagtggtgcacactcttgaaatattacttccaagcttctatgtgttgcatttttattcctcttatcctagcttttcgcagcacaatttgttggtaatttactgtcctacagatcattattttagctgtctcttcgagagttatgtggtactctagaagcaaagagtgaatggaatggattaaatcgagtaccaatctagtttttatgacttacaagttgatatgcccttcaaagacttacatagacctttgcatagatacaatcttaataggatctactcatctgacttaaaatatggaaatctcttgttttttaccataagcttgctaaactcctcattgtttatatggatttttcttgtttagctgtaatactagcatattttgatggcccttttctgatatagcttgacattgttttttttttttttgatttatatcttttgctttactggacttcaaatgatattgaatttttttttaaaaattcttgctgatggttgcaacatgttcattgtcttttatttggccagcatggagtaaactcactgcttctgagaggagccaacgtatacgaaaatggtatttaacccttccaatacgatcttattaaattatctgtgttgtgaatgtaaatacttccaaattaatcaaatagttgaaaataactgtgttgtattggtagagtattatggttctctacactgaatctcatatgattctttccacctgtattgtaaggtatgacctactaattgctcacaaggaagagctgggacaattaataaccttggagcaagggaaacctctgaaagaggccatgggtgaggtatctcatctcaactttgctttcggaaattaagagataagcgttaaccctacattgtgttactggtcattgtcaagcaacatgtgatccaagtctctaataacaggttagctatggagctagttttattgagttctacgcagaggaggcgaaacgtgtatatggagatataattccagcgactcttggtgatcgtcggttatttgttctaaagcaggtggctataactgtttgtgatatatgaaatcctgtttaattgcaaatacgagtaaattagttcttccgacagcctggctactcctatagacctcgataatttgcccttggtttgggtctctttacaaggccttttcaaattgtgttttaatttctggcaccagcatgtatgtttaatgcaccaatatttgttaaaaccacataaaactcatgatttttaggaattaaaatcctcgggttcaatatctatgagaagaacagggcccgagatcttgggacacattccttgcatgaactgtgttttagtcaactttatcctggtagcggtccagaaatctgtttcttaatgatctatcttgatgaatagttcttgtcacaacttttcttctttgagctgtttgcatggctttgataatttcccagcgttgcttgtttctgtgcaatccatttattcagctatttatccagcaatcttcatgagtttttgcagcctgtaggtgttgttggggcaattacaccctggaactttccattggcaatgattactagaaaggtgtgttcattttagaatgattctgtgcaaagaaagttaaccttttctggtgcatgagtttgttgttgaagaataacatacttttttcctcacttgcataggttggtcctgctcttgcttgtggttgtacagttgttttaaaaccctctgaactcacacctctcacagctttagcagcagctgagttggcccttcaagctggaataccaccagtgagtctcaaactttttacgtgcacagtggaagtttcttaattatttaggccgtgtaagatgcaagtgcttggatataatgtggccttggttgtctttgtaaattgtgtcctgttagacattgatgataaagttgatactttatggttgtttcaatgagaaagacttatcctctgcgatgcaatgaagtttttggagtaagttttggttggaaactaggatacttgtaatgttttattatagtctcagcatccaaaaatattctattatctggttgtgcaagaagaagctgcagcaagctaacatttagaatatttactaaagagtgcttaaaaagtaaggagggatgggaatgtaacataataaaatccaagtatcatcccatgggtattagatgtttatcacaagattccaactaagcaaagtactgaagaaaaatgcccttgctgactgttaaattgagtgactttgtgttgcaggaacacctactgaagaaccacaattgacaaatagagtgaaatgctcttttgtattttatatctcatcatacctgtgttatgattgctaacctatgctaataatcagttgagcatccttaccgagcaatgaaacagaaaatacccatcactggcaatctttttagctccgttctggtttagcatgtccttgcatcaccggacaacagcaggatctggtctatcgtcctgatcaaactgctttctgctttgaatgacataatgatggaatgaatgaagctttttctggtctgcttttgtagatgcatgtcatacacaattgatgtgttatattagctaatatgagttcaaatttgttggaattctgttcatttgtttttaatggttttaatttcaatatttcagggtgttctgaatgtggttatggggaaagctcctgatattggtgatgctttactagcaagtcatgaggttttacacccttcctctatttccttaaaccaaccttctcttctctttgacaacatggcattgtcctggccagagtagttggatattcaaatgacataatgttgatattcttgctttatacatctgattcaggtaagaaaaatcactttcacaggatcaacagctgtgggaaagaagttgatggctggtgctgctggaacagttaaaagggtatgcattggatgcaaaatgaatcaatgtgatgatgtttcagaaatcatcttatggctaattgtcttttcccttaatctttctagttatctctggaacttggcggcaatgcaccctgcatagtatttgatgatgcagacctagatgtggcagttaaaggatcagtaagttagaggggttccctgtgcatgtttattttgattgtggtattgtcatggatatttctgagtgccatttaataatgtttactttacatgtttagacatatcagatggacacactaagcttcctatctgactggaatggattttggtgccgagggttgttaattgttggttagacatgggggtccatgtctccatttttggaagtgaaccttttgtgtgaattgcattggtgaagccatttgatttactgatttcaggacagcctattactgcagaggctttgattcaggattttgaaaatgtgcttttgttttgcattcattattgggaggtattgtcatggtggtggtaatcttatcaaatcatttcatatcattgcagcttgcagcgaagttccgtaatagtggacaaacatgtgtttgtgcaaacagaataattgtgcaagagggtatccaactacagaattacagccctgattttaccccttaattctaattttatatgtaatatgcagccattttgatttgtgatatattgcacctttatgtgcaggtatctacgacaaatttgcagattctttttcaaaagctgttcagagtatgcaagttggggatggctttagcgaaggtgtgacgcaggtaggggttgcatttttttttttaaaatatttcgtaattgttcccttgttgaataataatttgtgcaaagctagtcaggtattctatgtttcctagatttagcagtttctagggatgatagcatttcaatggttggtgacacatgctagactgctttatcatctttattgctccctatctcgttgagtttgtccaccttttcattttgagttgtcctaaaattattgccgactatgaaaagtcaaaattattaaccatttggtcttcttgctatatccttaattttactcattttattttatttttaattcaactactttctccctcgtaaaactagatttaaataaaactctttatttcttgagtttttcaaacacaattcttattaattgagggagtaaatatatcaatgaatttacaatgaaaaattgtcttaattgtactatttatttagattataatatgtgatttagcaagaaaataatgcccacacatgctaaaaaagttgtgattaatatacttaaaaaaattgttctttctttgtagtttcaaaccttgatcaactactttgcacattaaacctctcaccactagcccaaccaccttgatatgattggttctggaatataataaaagggtaatactagaaagtgatgaaggaatggataaacatgtcatcccattaattgttccttcttaatctttgtgaaagtcgaagggtactagactttgggtaatagggagtctgtaatttgtttggatgaagatattctaatcacacattcatgcagagatgtagtttgttgtgtttatacatctagaaccttttattagctactttcatgagatttgaagtgaacagatcatggtgataactattagtttcctcacagggtccattaattaatgaagctgcagtccagaaggttagttgcattttatacatacaattggccagccatcttgcttgtgataatcctttttaattaatgagatttgttgtcaattggtccctttgtgatttgggtttcaggttgaatcatttgttcaagatgccatctttaaggtttgccttttctgctttatcttattcaatgtactaggttgaataaaacttcatgcattatattgtctttacatcttccaatatttcctcttcctccccgcaatacactcgacctatgatagcattatatttttatgaccaagggagaaaacttttggaggttggagtaaacttttgtatgttttggtgaaacctagaagtatttgtaatattttcaacgccaaaaaattctataatgcaattaggttacttcgacattctgtttctttgttccctcgcacttcattatatgaaaagctgaagccaaataatagacttggttacagtaattaagtttcactggcataattgttcttcaattatttgttctgtatatatctcatttctaattaaccaaaattgtacttgaagggagcaaaagtcctccttgggggaaaaaggcatagccttggaatgaatttctatgaaccaaccataattagcaatgtcactgaagcaatgcttctatcgaggtaaatacatgaagataatttattcattctgcaattctcagctgtataattaaagatgtccatcagctttcttacaacaggtaaaaggatagtggctgttgttctctgccacttgctgatgggtatacattcttaccttcagtgcggctggttgaaacatgcagccatgctaaaaactaacaggccaacctttaggttttggcatctaatcatggacactcatggtggttttgttttttagctctttcttaaccatggcatgtaaaattcaattgcaaacttaaggttaatgttcttagacaaaccaaaattgaggtcttgtttattgatcggggactaatccaggttcgcagtagatgacaaaattgaaggctccttaggaaatgttgcatccacaaatactgccttttaatcaaatgaagttgaaggactggccattgctttcagttcttttatgtgattttggagttggtacttcataattaacttgctgcaaattcattttcaaattatagaactttcttattaatcagagcttagctcgaagagttaatggatatgtgtaggtttataatggagcacggtgtggtttgcattttcatttttgctctttgaagtattttggtttgcacattgttgatatcagtagcgttagcttttggtttgttaaatgcggcatcattgatttgtttacattaacataattttaatccatgtcattgaagttccttaacattacctataggtttatactcattcaggatgttaatatgctctcctctgccttgtttcagggaggaagtatttggcccagtggcacctctgttgcggttcaaaactgaggaagaagccatcttgatggctaataacacaaaagcaggttctttcgtctgcctttacatgcatacatgtacacgtatttatctttttgtttcctcattgctatcattttaaatatcaattatctgagagtattacagatgaaagtttgtaatatactccttaacccagtttcattttccatactattgtctttatctattgtcatggtaaacagacttatggtcaactgtaatacaggattctagcttatcttttctggtaaacgatgcagggttagctgcatatattttcacaaacaatgttcaacgttcatggcgtgtcactgaagctcttgagtatggacttgttggtgtcaatgaaggacttatttcaacagaggtgggacttatcctgtgttccccattggaaaccatagattggcttcttaaaacttaaaaaatgtctgttgctaaacaggtagctccatttggaggagttaaacaatctggtcttggacgggaaggctccaagtatggaatggatgaatatctggaggtaaagattacttttaatgcatcttaggaaaaagtgaaagctatcttctctccctctcgctcccatgtttaagaacacaaattgggtattctaatcttctagcttgcttttaggactgcattgtttatcaacttaatcacacacatacagatctacatttctttattctttctatttgagggttttcaacctgtatttatgtgtgagggagatgatttactaattaccctggttttcaattccctaaggatcaagttcttggtttattttgcacctcttttagacctttactatcatcataacgaggtattcttgcatgccgtgcagatgaaatatgtctgcttaggcgatatgaacagaaaatgaggttcaaggtttgtatatatcatcaattgcctgttatatttggaatctggttgctcccattaaacttaaattttcagataaaatgcttgttgttcggtttattcaggcaattaaagcggctcataatctgaaggtagctggattttggggagagtgtgcagtctcgactttctgaatcttaagcgtagaagatgaccagcaaacagggcatcacaacatgtgtacgtaaataaatgcaagtttgcaccatttcccagataaattaataacgtatcttgctgctgtctgttctaattctaaaccctttcatcgagatagttttctttttccttgcttctgggtaatacttgtgatcctttttatgcgcaaatggttaattgccttctcttttcttctgttagtgttttctttgttagtataattaatgagaagaaagccttagcacaccggcctagcaatcttgcttctctatttgcactggagaaaggaagatacaaggcaggcagatgtgaaaatctgccatgtcttccttgtgtatctggtgtaaatattactgatataatcatacgttggaaattacgaggcaacaactcctttgtatgagtatatgctgctgtcgtttctaatataaagataaattaatgttttttctatctaaaaaaaaaaaggaccgcctatttattgtttttttttagctattgaactaaggtttcaatttcgtccaagaaaattaagatttcatttttattaataaaactaaaaaaattaatacaaacaattcaaactttccagttcctaaacttttgtttttttttttcattttgtacacaaaagtcatctcaattaatcaagaaataataggattgatctgtcttcaaattgaaaatgcatgtgccaagattactaggtggtgtttgagaatctgcgctttagaaagtgcttttgatgttaaagtaaaataaagggcatcatcatcaaattctaatatcaatagaaccaaaagaaaattacttaattttgaggggaagcgatttttttcaaattatattaggaagtacaatcgaaataaaaaaaaaaagcccgtttcgaagctttattcgttacaatattgtctgagcagctttagaaatgattattgttatattttttaaaacactgctaaccacgtagaaaacatagtcgcccagtccgcatcatcttcacttaaaaatcataaaaccctccttaattattcccctctctaattataatccatctaataatgctacagtactgtatagttatacaaaatccaatagtggaaatgttattatctaggctagctataggaatattttagctttagcacatcgtaaagtaaaaggtaaaatcgagtatcaaaatgagagaaaggcggggaaatctaagttgtgtagacggtctgatatcttgtattccaaacaaaaggtgtttcgccaatggaatgtcatatattccatattttatgtagctttgcaagatcctcttctgccaacttacttaccggtcctttatcttctatatatttttagataaatccttttatcttcttcatcatcgctgtatatatatagctgaacctctgagcacatttcaagagaacaggtctatttattaatatttagcagttgatttcttgttcgcaggatgcaacggagcagtctcatacttgttcatagtatccacctgttcttgatgaaatggagagactcattctggagattttatggagagtttagaattattttttttggtgaattcgattcatgagtttacaaatcatttgtggaccatttttcttaattattattttagtcatagagaatgaaacatcccatcaattcactagggcgagcaggatagaaaagacactattctaaagtattataagcgtacataaagatgggtccctcaaattcaccttcaaaggaatatattcattttagagaatatattcatcttaaagatgcttgaaattcaagctagcatgcccttaaaatcaagccaaccattttcccactggattagaggcttcaaatataatgaactaaaagttagaccttagctttgcttggttatattataaaggcacaaatagtgagctaatgtgttagtccaaaaagctaggaatcttcaaatctaaatgaaatgtcatcttccacatatggatagatcagagccaaaatacaaagcaatttcatggtaattaattaattaattattgccaagtgtggtggggggctggccattatatatggccatatataccacctgcacttcaatggtgacccaaaccagcttgttttccacttggtttacatgcataattggcttgctttggacggttaacatataattaactcgtatggcttccagaaagaaaaaaagaaaaagaaaaaaacatttgagattttaactcttcatggatatgaacttgaagaaacgtactcttcatagaaacacaagtctttgagcgtgagattgtttttttggtgggagaggatcgaatcttcctttgattgtcaaagacgaaagcatttattcccatttgttagatttcagttgatagcttccatttcccttttttagatctctcaagacttgctttccatacgagggaacgcgctaatttgctttgttttaaaatactgagtgattgactttgccacgagttggatcgacgtttcaaatttctggagtctaattgcttaattaattgttactaaacccagttaacaacaacaaatctagtatatttggttttgaatatgtttgaacatggactcctcccttttgttgatgatcatctcaattatttacgagtgatgaaatcttcaattcatatcgagagatgagatctgtgagtgtgaaagtttttcttttccttttcaaaacgaacacggaaacaagataagaaaatgctaccaagctttgtgccaattccaaacccgatgtacacacacacacacacactgtttttggcatttcatcaaataaattttttgaatgattgatgattttttaaaataaatttaattaatattaaatttgtcattgtttttttaatatttaagtgtgtcaggacttaaagttcaatattcatagacttaatatttagttttactatgtattaattcttatatgttatattatatttataaaaatacatatttaaattaactgagaaatctgttccaaatctagtaggaaaaaaaaactttttttttcccagctttcccctggaaattttaaaatgctcaatagggtaaaaacacattcgtacatatcaagattaataaaaatatatttgtatattctcccacttatttctctcttcttcttcttatatttatttatttattattaagtaaatattaacaattaattataaccgaataccacaaatattttccttttcccacccctaatctgatttaattactatacttctttaccatgcgcgcgtggggcccagtgtcaatttgttggctttgaccctattagggttcttttgtttgttatggcttggatgaaatgcatgccaggacaatctttaattccagaagatgagcccagcagcaaagctttagaggaagagaggtccccaaatcctgtcatcaaaagctccatactcgaaaccctagctttatgcattgatgttcacgtcctcggtaccagccacaggagagctcctaaaaggtggttcaaccttgtctatttgttcggtgcttttctcatctctaataaaaactacatttatcccccactatgtttaaatccaagatgcattgttgaatctcgtttggtatcattgcatgccttttttttgttaaaattttgaaaataaaaaaataatggtaaagaactaacactacttggacaaaaaaaaaaaaagaaggtaaaacttagcatggctgatgaaaaatcttgaaaacactagttttttaaaaattgaaaataaaaacgaagaacaaaaaataatttgttttcaaaaaggcaacaatacctaagtttttttttttgaaaaaagataccatagtttttaaagttagaggacttgcttaaataaggatgataatttaatctgaaccagataaataccgacccgatccaaatgagtgaatattttctggatagttaccttacctgatatgtaatgagtagggtataatattatattgtcaaacttgacccgaaatcagccctaacttaatctgaaatatatatttatattatatagatatatttgtagaacaactagatttttttaaatacaatatgatatatacatatctcaacttgatataaaacatacatatatgtataatatttattattttttcatttaacatacacacactttaaatatatatattaactattttattttttattgaataataaacaatattcagataattaatattcttatgaatacccaaaactcgataaataacttataaatatttaatttttttatctaataaataataagtaaagaatagatatcaagaaattctacttgcaaatatccattgccacaactgcctttaaatatgtttttgtttttgtacaagtataattataatgtaactccaatactgaaagcaaatctacaatgatacaaaaatcttctccacagatcatataaaacttaatcaccacatggagtgatgttcttaagagctaattaattgtgttgatctaaaagagtttaaagtaaattaaggatatcgcgggcttaactattttaaaaaataaacaagagttatttttcatgcggggcacgtcgttcctaatctttatcagttattcactgtacgtacttaagaccagaaaaagtactaagaactggatacagtagtactgataattgcatggagacacgtgtgaagatttcgtcatcatcgacgatggtcgtacttctatagatcaaagatattccaacaattatcgtggagggatcggctggcttgttgaggattttgcttcctttttttagcatttagaattcaaatctatcaaaattttcacgaggatgtatgcatagatattgtaaaatagaatttaatttcaatatatgcaaattaattgatataaaaatatatatattttaaaagaaaagaaaagaaaaaaactctgaatgaacaatgataccccacggtattgtgaaagtactctatgtgcacaaaagaggtttagaaaagaaatgtcaagataattattattacaaacatatcaatcagttcttttagtaggccaaagagatctagatcacttcttgcaaagaaagtctaaataaattcagaatctaacaggaggataatattaatggttaattaatatatatatcctccacctaaaatttcaagtcaatctctagctatataattattacaatctctaagtgacaaatggacatgaattagatctatttgagtgtttaagagtacttttacttctgtttttaaaagtgtttttagcttaaaaaaatattaaattaatttttttaatgttttctaatggttttaatgtactaatattaaaaattaaaaaaaaattattttaatatattttcaaatgaaaaataccttaacttacctcataatccaaaacacacactaatcaagactacacaggacattaattatttgtaaactggaatatttctaaagttttaataaagctaattttttgaataaactatatcctgttccgacttaattatagctgaagtctctgactagacctgggtatcaaagacacaatatattccttgggggcttaaaacaatttttgtaataaaattaataacaattggatatatatatatatatatatatataattatgacaagaaaaggagaagattttcaatatatataagagttagataactatataatccgaaatgacaatcattattgtgccaatatatatatatataatcaacaagccaagatagagagtgtcttaatcatttaaggtatcattgaaacctttttgttggcaatgacatgaactaaagcctgtctttgcgctcaaaaccatcttggcaattatgatcttattggttcataataagctaaaaagtggattgtactacgaaacaggagaaatgatgtcaagtgaccatccatgcacataatgtctggtggtaagatatatctaggtttatatgcgcgcagagcatggctcttcccccctccaaaaaaaaaaaaaaaaaaaggaaaaaaaaatagaggtaaagtacaaaacatatcgtggtcatcatgattgcaagagggcctccatttctcatatcttaataccaaaaaaagcttcacatggtagaagaataacactacaaaaaagatgtattcttcttttggtgatataaaaggtattctactctcctctctgacaatattacaggtacatctatacagccccaaaacataaagattctcacgcgctctatctctatgaattctaatatctttttagaaatgggtaatttggcaatggtgtttcaatttagggtagattgctacagttaaggaagagagatagagagagggtatcttttgacaaaggttgtagggctgcacattagggatagatactttattttattttattttattggtattactatacgttttcttttatgcaaggttaacttgtccccccccccaccttgctttctactagtgtgtgtgagagggagagaaacaaatcccaccctctcttcttcttcaaaaacgcaccctattcttccctatttgcatcgcatttgttcttgaatctctttgtattcccagagtctcttagagagagagagaaagagagagagaatgttccataccaagaaaccctcaactatgaattcccatgatagacccatgtgtgttcaaggggactctggtcttgtcctcaccacagaccccaagccccgtctccgctggactgttgagctccatgaacgctttgtggatgccgttactcagcttggaggcccagatagtacttaatctctctttgactagctagtctttagttctatttttatgtacgttcctaatttgtttgtgctgataacttcttcaatctctctaatacgtgttctattgccccccctctctatgcttgatcaaaaaatttgcagaggccactcccaaaaccatcatgagagtcatgggtgtgaagggtcttaccctttaccacctcaaaagccatcttcaggtttgaatagaacattctttcatgcctcttttgcttttgtattgacacctttgcggcattttcgatgtagggttggcttgatttcattcattcttttccttctatctttaattttcatttctttaacgtttcttttctcttaatttagaaattcagacttggaaagcaaccacacaaggatttcaatgatcattcaattaaggatggtaagagagctaattaagccatctttatatacagggtttttatttttatttttatttttatcctttcggttgttaaaggtggcaaggaaagactcggattcgactcctttccttccttttgctttacacagagagtgctaaaattaatctaaatgcttacctgttcttttttaattttccttgctttgattcttatacatgcacaatgtgatcaaaatgatcagattaattttttcataattttccatggcaagcagcttcggcgttagatcttcaacgaagtgcagcatcttcatctggcatgatgagccgcagtatgaatgagtaagtattacattcaaaaatacctctctcttaaaccaaacaattacgaacaagcagagttcatgcaattttcattttcttctaaggataacaataacgatataaacaaaatcgcttaagtttctttctttcatttctgtggaatatatgtgtgaaactgtacatagcagtaactcacacatgattgatgcgattaggatgcaaatggaggtgcagagaagactgcatgaacaattagaggtaagcacagatcgattgttcctcaacatctactccaccccttttttttatatataaactatttccttaataaagacagtccgtgtagactttatttgatgcatataaattaattccaggttcaaagacaccttcaattaaggaccgaggctcaagggaaatatatacaaagtttgttggagaaagcttgccaaaccctagcaggtgatcaaaacttggcttctggaagctataagggaatggggaatcaaggaattcctggtatgggtgcaatgaaagaatttggcacgctgaattttccagcatttcaagaccttaacatttatgggggtgaccaacttgaccttcaacacaatatggataggccatcactcgatggtttcatgccgaacaacgacaacatttgtttgggaaagaagaggcctagtccttacgatggtagtggaaagagccctttgatttggccggacgatctgcgtttgcaggatttgggatcaggaccggcatgtcttgaaccccaagatgatcctttcaaaggtgatcaaatccagatggcaccaccatcaatggataggggtactgatctggattccatatctgacatgtatgaaataaagccagcgcttcagggtgatgcactggatgagaagaaatttgaagcatcagcaaagctaaaaaggccatccccaagaagatcaccactagcagccgaaaggatgagccctatgatcaatactggcgccatgccacaaggcagaaactcaccatttggttgaagctgacctatgacttgtgtagatgtaagtgacatgatataaattattaagcttctttataagtatgagatgtagggtttttggacttgaaagttactagcaatttattaaattagggttctgctctgggcataacataacgccatgcgtggcaaacaatccagttaaattgttatgaattaacaagtacattaaacttgtacttattttggcacttggcttcttcttgcttccctcgtgcatcttatatttcatggcttggaatacggtagcatattaattaacacttaatttaataaataaatttcgtggcaactcctctactactattaatattatttgcttgtaattaactcccatcccgtacgtttggtgtcgagacaacaaggagtcttcaagctatatatatatatatatatatatatatatatatatatatatatatatatatatatatatatatatatatatatatataacttaatctccttcattttatctctttattgaaattgacaagtacagatacaccacagcccttctagtttgtgcatagaattacatacaaaggcaaatgctacggattcttgtcatcgccttgctcctttctttattccatgcatgaaattaagttcataccagcttagcggattaagttcatggtgttaacatttcatgatatcttcaaatgtcattcgaaaacagattggtatcatcattaaagtatgtgactgggttcagtttcgaaccatgatagggatatctaatgcaaatttaaggacagaaagaaagaagatatttcatcgtgtccttgaagacccattgaatcttctactgaacaaaaaatataaaaaacaaatgccactgtctttgccattatccctgcaaaaaaaaaaaaaaaaagccaccggctttaatttttcagtcaaggcccgagcttgaggaatacaggcatgagttctagatcgacaatttgcgcacttgaccttcctcgacgtggtcgaagaaaacaaactgaaaagacaagaaaagaaaattatgcagagtactcctcttacatgcatgcaagttatttatcaataccatcactaattatggcccctatttatgtgagaacctgggattttttctggaaacaatgaataattaatccaaagaaagagcaacatcttccattttcttttatgagcgaaaagggaaatcaagcaacgcctttattaaccagctgcaagaccagaccgggctaataccctctcgaacaataagaaacggcaatcaatttagatatatatatatatatatatatatatatatatatatatatagggaaaaaaaagaaaaaatccctaaatttgaattaagtatatgcaatatttatgtaaagctaaaaccacatgaaaaaacatgtatcatggaggagtgaaacatgtgtatccagaacctcaatgcattatgatacagcttattttatgaaacaggaaaattcaaaatttgttctgatgggggcttttacaatctcatagccctgtacttgtacaatgtcatgtttggtcctcgtgggtcaatggtcaagccatcatgcctgttacgtactaatccagaaatctttttctaaccgttgcttttaagttagttgctctcagttagttagtcctatcattgcagacaaagccattggggaaatgaacataagaaaaaaaaatccactatatccctgtcaaaaaaaaacattctagggttttgggaagcacacatgcagcagtaaaataatacatttgatctgagtgaagggagagattacatatatggaaagcttttttaatgaagaataatattttacccttgagagaacccgacagggggtatatctagctaattcatgctcctttaattaattactactgtgttccaagggcatcaaaaggaagaggacaaattactaactagagggtaatctcatcattattttggtatgcatgcatcagcatgacgtgaagaaaaaacacacatatccctttcaccatattcttaactaagattttgcctcccctgatattgaaccctttttagaaccatcatatgatcattatatacatcgacaatgtatgcaattttattaattagttgatcttatggtgcatacttttgactgataaattctctaccaatactgaaccagaactcagattttcatcccagttccatatttgcctatattcgcgcacacacacacacatatatataggcaaactaaatagtaaccaaataaaaatatcaccctttagttatatatcactaggttggtgatgtagcaaagatgagaaatatgcagaggtttctttctctttgttgatgacaaaaaagatgtggtgccactacctttatcggttgcagagaaattgtcaggaaagctccttctctccacacagacacaaagagaaagaagaaaagctaataaagcctaaaggagaggaggaatacaacgcactttcatgagtgcacatatcgaggaagcttctacctttatgtgtacagagttgagggtcttccttgcctcaaaacctgctgcatgggtacgttttatattacatttacactaatttacatgcataatgtgagcattatgctttatgtggtaatgatcatataataagattatgaatctgccaagaaagaaaataatgatagggtgattgaggcacgatgttcgaagcaaattaaataattgtttgcatcctaattaaggcaccttggattctgtttagcttcctcattcgatacgtttgggttcttgctttgagtgtttactagcaaagtactggctagaagcttcttttgtcccatgtctctcatgcttttagctaggcatgtagaaaatttgttcgtggggattgagttagttaaggataaaaataaggttggatatgtggtggtcacgctaaggacattgactggtgtataccgtttactgtgataattatcgaaaaatacacccgatgtagatttttgtgtgctcagtttcactaatcattgccaaaataatgaaaataacattcgttatgacctttttttacaaaaattacactcatgatcttcacttagatgttttcaaattattatcaccctaatttatcctttttttttacaaagaaaaaaaaatgcccatgtacatcatttgaaccacgaacatctcttactgtttatttcttagaaaacactataagatttgtgtttcacaaaaaagataggtaaaacaaaaacaaatatttttggttgaagaaacgaaacggatacataaaaataaagctctgtctagctatgacggttttaaagttaaataataatgtctttttaaaataaaaaaataaactaataacatgtctatcatgtctcaactgtacatgactcttttgttaaccaaatattaactaaagtaatacaaaataaactggaatttaaatatctatagacaatgacaaggggacaatttgttcagatgggcacataaaaacaaggatggttcatgtgattttataaataaaaggaatgatttgtatatataattgtaagctaattataagacacatcaagaatggtaattgataatgtctccgttagtttaacttttcacatgaaatgatcatgaaatatcacttatatatccaacgggataataaatatttatgaaatcaactacttaacttccatgggaacatggatttaagagacttttaagaatattaagataagtcctcatgtttagagaaaaaaaataaaaccttacatgcaagcatttatacatattaaaattaaaaaaaaaaactaagattaatcagtgtttcattatggattccatcacaattcattgtggacttgctcaaatgaattaatgaatttatccttcttaaacaaagcaaaataacatgatttgaggagtaatatgatatttttcattggatacatttgtcattataagattgaataggggcatatcggtatttttctttccttttgcattgtgtaataactcaaataccctcaaaagcataatttaattaacttttatgtaggtatattttttagttttcaatttcaaaaggacaataaaaaatctaaaatacccttctaggaaaaaaatcatgtagttgttgtttaggggcttttttgtcttttcgaatgagggttaatttggtctttaataaatgcaaaaaaaaaaaaacaattggcaggtgcaggctcctattataactaaacataggctttcatggaagcgttagaaataacccactaaggtctttctagtgggtagacgtgtggcagtggagactgccggtatggctctgatgggcttttttctagtcctttttatatagggttatcatgggtcatgagttagtcaatttaaccaggtttaacttagtttttgtttcaatgttttttctattgatttaactttggtcttctttttcaggctttttttttaaatagttttttttatcccgatctcatatcacaggtcgcaagtttatcaaattaacttattttttttacttttcttttcttgaaattgattttttttttccatttttatcatttaacgataggttattaggccttgaattgtgatttttttcttttttctttctgttgggctatcccaagtcacaagttagtcatcttaggctgactcaattttttttcaatggctttttatttaactttgatcttttttaaaagtaatatttttttatctagaatcatattgtgggtggtgagtttgttaaattaattagaattgactcaaatcatcattcattgcccaaacatttttttttatattatataaaatttaacccaatctgcgatgcaaggcaggcaaaccttctagtaagaataataaaggatgagggttgaagcactcaagagacagtactttagcaggaaatagttgaattttccatggagagatatcagattcaaaccatggaaaaaatgggttggcgattaagatgaaggcttgggaaaaaaaaggggggcatatacgcgcacacaaacttcctgtattcgattatgaatttatcattgataataaaaaatcaattgtttgcctttgaaaaaataaaaagagggcacgggacattcaatatgcttggcccaaaataagaatgaaaacctttcggagacactctaaactcgcctgggccttaccacaccgaaatgctctaagtggagctgttttcgttgaacgagctaaagcttatgaaatagaatttctgtttcaaaatacacgacgtcctatcgagctgcctgatgccccctatgcttaaagttttaaaaatcctaggtgctactttgtaacaagcaggacagtcgacggccgaattttatgaaccaccgcaacaacttgtgtcaaagtgaaactaatattcagcacatattggattccacatatcatcaaatcaccacagttacatggaaaaaaaaactcatattcaaggttgtcaaaaacgtttttttaacacgacacggaatatataatataaactcgaatcgtaaattcaaatcgtaaaattataaaatcaaaaagtaaaatattttaactaattatatattgacaattacagttaagtagtatataataatataacacaattaaaataaaagtgaaataaagcgaactatagcactttcatcaggaaaaaaagacacgggattggatatatccaactgaaatcaagctatccatgcaaagagttaaaaaaaaaaaattaccaacaaatagaaacatagatcaatagaaaagtctactgtacaaagaaaataccagtttttgctcatcagctcaaatgaccttcttagtttcttcatttaaatacatgttggcagcagagtgttagaagataaatgggtgaggggtattagtatatgctgatttcctatcttaacttcttatacagcatacacttagttggttaccttatgcaagtcacaaacactagttcgacaagttccataatcaacaatgaagaacatgaattaagcattctactgaatcccacaagaggggcaaattgtaacgaacaagctacacaaaaagagatcacctaaaatgagcatgaaaggtaagaattcttgatggatgcaaatttgtgaaaaatctaattgatggccctatacatattagcagattgcagtttattattcagttaggtcagaacctaaaacaaagaaatatatcaataggcattctacagtcacacatttcacctctaagagaatatatcatgctctttctttgctcacaaaacaaatttgacattccatttaccattcatgccagcattgagggttcaattatttttcctaatttgcagataaggcacctgaataggaaaaataaataaaaagtggaaaaaggaagacaactcaagtcgaaagcagttgcttttgactatgtataacacaatgcacatgctttcagatgttttaaccataaagttatgggaaatgtaccttggtaatcacttcatacccaattctgaatctaacatcttgttctctatggaaattatagatgctccaagatacttccgcagctgcttttaaattcctctgtcatggtaagggaaggaagatattagttgcatatggtagctaggacaacagcttacaatttacttcttgtatctagctccccatgaacctaaacaaaaacaaaaattaaaaattaaagccctaaatttgcattttaaagaattcccataaataatatcaagaaatcaatctcagttacctgcaagtgggtgctggaatcaatggcaaacctcttattggcatgaattttgagggctttggaatctactccatatcttagagatgtctccattgttgtatctctaataatctaaaaaacccaccgaaagccaagtaaattgcaagaacctggttctggtggttgcgcctccgtcgcagtggtgaagacttgagtgtagagagacaaaaatgggtgttttgagagaaagaaagagagtggaaggcgttgccggtggatttgaggaaagggggatttttgtgagacaaacgggatggagaggactgagattctgagaagagtgaatagattttgttaattttttcgaacgtttgaccgattttaaccgagtttgactgagtttaaccgagtttgctacccgatttcacactatatctctgagttgactcgtaaaatcaggcgattttactagtcaactcgcgagtttgacaaccatgctcatattgcttcccatagactccgatctgtaggctaaggcgcagcacctcctacaaggtgggcctatgagttgtcagatctctgttcttcttgggaactaggatatgtttttctcagcttaaagttataggggtgttgaattatacgtgttaaatatatgatttaagaattttcttcgagttatgctgaaaaataattggactagacctccccccattaatttccatgggttaatgtcgggacaattcaccgtttaagcttaaacgccttctcttatcagaatcattttaatgcttcgtatttatggtggatgcataaagtttcttatgagaaatgttcgtgacttttacttcatgtatcacatttctttcttggatttaataatctaacattctacctaaatgaaatcgaaataacagtatttataaaataaataagaatatataaaactttttatataaaaaaagtgttttcccttcgaatccaagcgaagcaattaatctcaaaaaagaaaagaaaagaaactccatgacagggtttaaggcccaaaacaggctgagacaattacaatatggtttgttgcttgattactaggtcacagcgcattaagcccataattacaaatggcctactacaaattatttctaaggttaataagtccagcttagagttttctctgtgtcctcgatcaggctcttcccagcccgtgctttatccccttcaaagttcgatgcaaatcccagttcatgagttttctttcagaagagacattataaatgacaaacactcgccaatgtcagtaagattcgttctccgattttcaatttctcagtagcaactcaaaagtagacttgggaagattataacaagcttgaatacaacttttcacctagctatattatagatttaacgcctgtgaatacctaataaacttaacatcttattccatcccaagcttgaattggtcattttgttcttcgtggcttggaaaccggttacatactacacttgaagattaaatacaccacaaaccccaccagtattgcaattagatcaaaaacatagttatagttaatgccagttaatcatggagaagcatcatagatatcagcaggagggatgaaataatccatggaaagccctggcacattgaacacgacatcatcgatcctccatacttcttccattctagtcctactgtgttgcactgacacttcctcgaatcgaaaaactgtagcaattgaccttccttgatgagcaattaacacaccatccacatctctatagtcgccaatactacttcctatagtagtctcccaatagatagtttcattttctggagtttgtacccttgttagatgggagtcctccaaatacattaagaggccacttttttggcaaaaatagccatacagtacatgcctaagcacctcagctggcccttcacttctttccattacagcttctcgatcagcagctacttttaaaacgaagcaatcatcctcgccaattcttttctcccctaagcattgtgctttagcaaataagctggctgtactctttggatccaggccctggaataccaccacatgattaattaagtgcacgaagaaaaggtctaagttttaggtgatattagtgttcgagcacataattagatgcaggacagggtactaataacttgtaatttaagaggtttcaggtttgagcttatatatatatatatatatatatatatatatatatatatatatatatatatataaaactaaggaagcatgacaagacacctgaaatcaaatgaaagaaccacaaattaaattcataaatttcaaagaattcaatgaaatactgttagacactgatccctatcttttcgtctgagaatggaggatagctgatctaagcctcgaattattaattagtaaaagaacaaggatatgatgacgagggaggtccaaatattttggtacttccacacatattctagctcagctttgacatcctaataatttcaataatacacgaaaataaaggaagtagaatcatatgttttttattcaaggtgcacaaaatctcaacagctgcaggccagtgattcctctcatgtcatggcaagcaaaggaaacatatacaaaatggggatgccactcctgaaaaaaaaaaaaagaaacctaagcataaatgttcctccacaagttatgactaattccctggttttttgtgggaaacggggcttggcccaaaaactccaaaggaatgttcatccctccgtcacttgactcacttggggctagaggcaaaggaaggaaccccggacgaggtactgggatttcaattttcaagtatgccacgatagtttctaactttgaaactcgccataatttcgaaaacgaaaaaaaaaaaacagaaaattggagaaaggagagaaggaaaacgattgacatgggaacgagaagaaaataaacaaagaagaggggggggaaggcaagaaaagcaaggggcgataatgcaataaatcaggtgttattcactaaagtgcaaaaaaggaaaagtaaagtgcaaaggatgattacaagctgcagtcccaaaaatatactttgaacatgatcaaagatgacgtcaaaaacaaaatcacgtgccattcctaactctgaataacgtgagagttcaaaaaaagaagctagtctgtctggtaaagctcaagacagtttccctatcatgtcagctacttgtacatagatcctaccatttctcgggattgtgatctatacatatagataggtcttcaaattctattttttttaaaagaaaaaaacttgtattggtcttccatccccatccttatgtctggtatgtaaattcgattaaagtagattaaaagtaaattgtagagtaaaaagcaatgttcctaattttgtcttatcgtcttcaacctagagaaaaacagaaatattcctcagttcaccctgttgtttcttctccctcatagcccgatattgcactaccagttttagatcactagttttctggctaatgtttctttatgattaactaaaactatggtcttcaatttttaagggggcaatttcatcaagattaatattgaatttgatgcactatatatatagtttgtacctggattatgcgacgtagagggcgttggggtcccttggcagcatgagtgccaagccaaggagtgtgacgccacacggtcttcccatcgctgcctgctatgaccttattttccccaacaaccaattcaagagaccacatccccggcaacatttgccaaagaacaaagcacccattttcgccacttctagtccccaagctcttcacgttttttcccgaggaaatttctgtctcgcaacgaatcatcttcacactccctgttgaatacatgtttttcatacatttttgttgctttaaacaccctgttgctgccaaatattgttggatgatataatgcgcggcagaattttcctatagaaaaaattgataagatggagttgccgaattaagaaaataaacatatggataagtagtgtagaagaacttacaataggagtgtttttaatgtgaatgcgatgaatggggtcgttaactagagggattggagctagagggcagcccaaaactccaagtaaaagccttaaatcttgtcctttgactggaatactcccatgtaacgatactgaaaaactgttacctgctggaagacccttttgcaatcgaaaccattcacgaattacttcccatgagctttcctttttgttaccttcttcttgcatgtcggggtcaggaccttctagcagcggagttaaggtttgtgtgctccatctttgcttccttcttgctcttgagcccatggttgcgaggagattaatgttatgaaatagaaagtgaaagttgttgaagatgaagaatggggtttaaagtaaaagtgaacagaagttgtatataaaagcgtttattacggttgtgagtatagctaagaatgagaaggaagagacaaaaagggacagcttatctgtccaacggcagatgatggtaattattataatacagacttgcatgttgggatgtctttcgctttattctttttttttttcttttagactcctcttgtcgtttaacttctgcagggattctcttgagaaactccaggtgagaggagccggatggattaggggctgtctctttctatatttaggagataaatttagctctctctttctttctaatgtctctgtggaccctttgatcataccctacatttttttatctcctaattaccctggtcttcaggggtaatcttccttaaaatcactgcgtaataagagcagtgaagtcttcatgattggcccacagcaacatcgatacttcatttcattcatttctccagtgtttattcatctgctacacacatttcctgggagttttctggtatggctgtagccacgtctatctgcactagagacgtacatagataaataatgttggtagggttctgctgccaaggacactcttcctgtttcaaccatctccactgacatatttctacctgaaatttatttttatataataaactaacacagtactattcaaaatgtgagctcttaacttttttaatgacaaatatacccttctcatcacaccccttgaatcaaactctttcaagaactctatattaaacttccaatttcctaccacttcttatgtgtgtgtgtgtgtctatatatatatatatatatatatatatatatatatatataacagcgcatcttacaaaacatattttattttagaatatatattttattttaattataatatcccgccagtactctagataaaagtaatatttttaaaaaataaaaatcgacattatagaaattgagttttatttttgaaatgatgtgctaatgatgttctaggacacttcacttttatcgtagataaaaatcggttcagcgtaaaaaatagtgggaggtgttgccaataaaagtcaaaagcaaacattaccaagagtgtggaaacgtagcaaactcttttaaaaatataaaaaggttattttaataaatttaacttctgcgcggtgactttaaatttaaataagcaataattacaatattccctttccttagttaatggacagcgattaacctctcttgaattcctgggtgtcttttcaacactcttgattcggtacgatgctcttggtaatgtttgacaaatacttgagtacaaaatcctctccggtcaatagatccagagcttacacggggcaattgaggttcagtccggtcaaatgatccagagcttacacggggcaattgaggttcagtgcaatcactagcttcctggccgtatcttctttaatggtgattattaaatctgcatttcccaaaatggttccctcgagcgtataatcttgtcaccatacgataatttaatttccaaaagaagaatcgtcgaatataagcctacctaatcattagaattaatcacagaatttcttttttttttttttacaattaatatcagacgaatttcgcttttaattttatatataactactatcagccaatttatcaaaccttaaatatcagtgatcatgatttgtcagtgaataccagaaggaaaaaaagaaaaaactaggtgcccacttgcgcttatattcgacgttgatagtaaagttgtcttgatttttttgaaaaaaagcttatcatctgggatccacaaagaggtgggccggcaattgtatctcaatattgcgattaatgtggtggagagtcggcatcaatggcggagaggcagatggagggggatgggtgatcttccaagccgaaagcactctctgttttggtgaaaggttgagacgtaactttcatttgctgggaagtataagcaggatcgatatactacattaatttgacatcgaaacacatggtaaaatttatgcacatgattacataagaatagctggtctctcacatcttagtcttgtatttcaagtagacaaccatgacgttaacatcatctcaccctgcaaaaaattgcaagatacaaaagaatgcttgacaaaaagagggcaactttgcacttgagacaatctcatgagaccaaactctaagacatcacaagtacgggtgttccttgtttcgtttataagaaagtttgtttcgaaattaactccttttttcttaaataatttgggttttagtattttttactaaacataaaaccatttttaaaaaccttaagaggggaatatcatgacattaggtctacagtggagttgtaacccttttttttacatgaatattaagaactcgtttatttatgtgattgtttgtttttgtaattgtatcacgttttggtttgaaccacaatatataagtgtttgattgcaatttagatctatgtttttattagttgaacccatcactttaccaagtttatacttcaattatgaaaaaacaagttgaacctgctttttgcacacaagtgtggagtgatagattttcttgttactgttgaagcatcgagaatgatcattgtagtcttttctcttcttgttttatcattctagaataccaaatatgtccaagatgatgtggtgactcagcctccatacctcggtaaagatggaacatgacggtagaaagttacccgagatagcccattcattttgacgttgatgcgttcgcccttcgctatctgatcagcaaactttagaaagtttacgcgcattgggcccttacaaaaactgacacttgcccagcaaactagaacaaaaaacgcaggcccaagagccttaacccagaagttcatgacccgccttagaaacccagcccaagtgaaatacgaaaacaaaacaacaattgctctgcctagcaacaattgtttggtggacatgctgcctgttttgttaccttcgtattgataaaagggtgaaataggagaagacgaccacttgaattttgtatatcaagtgagatatgtattatgtagcatagttttgaaacccaacctgattatcgacccggtccagtaatcgggtcacaggtcagatgaatttacttaggtcaaccaaaaaaaaaatacctatataaaacatctaattagttacaaacccttgcataatctcaattatatatactggtaaagcagcagcgaggcagaaggtcgcaacagtacctccttctaccatgcatgttgctgttggactccaagacttggaggctatctactctgaaagatttcacatacatgtcttctttcaaatctgaggatctctacctagcatattcagttgaatgtttcaaattaattaagtaggataaaaaaataaaatatttactactatatatatatatatatatatatatatatatatatatatattacaatttacaggggctagtaccaagttgtgtattttaaagggataactagataaggaacagagagacaaagaattcaagagagagaggagctttcaaagattccattaatagactaaaaataagtgaattagctaaattataatacctaactgactaattgtggtatctgcatcagcaatgatgacccgggcaattgcagcaattctgtatcagtgaatcagtgcatcgttcatctcgttgttttggtctttcagccaaaacgtcgcgtgacctttatacatatataaaaaaaaggaggtcggtctcacccgggtttacccgggtctgccgggtcccggattgacccgccaggtcgaccgggtttcaccagaccaactctcagagtgagttttttcttagatccagatcggtttcatgcttgggtcagtcgggtcccgggtcaacccagccagaccggtccgagtttcaaaactataacatgtgttgccgacggtatgaattgcatgtagcattattcctcggtgtttgtgcactgttttgtgtgtcactgacttcatagttgtcggatatgggcttgtaatctgatgagttaattaaagtttaatttcaatcaaggatatgatttcaactgctcctgctatgacaaggctgccaactgccatacagtgcagtaggcagacaatagtcacatggattatggacgtaacatgtaaccaagagatctgctcgatccagctttagagcatctctcgagcgaggaagacatatttatcaatctgtgtcggcaattgtgaaaagattgcaaaaaaaacatgagtcgggcaattgttggcacgtcctttaataattgatgcgtgttttttttttaaaaatcattttatatatttttaaaattatttttatatcttcatgctgaaaataatttttttaaacaaaatatatattattttattatatttttaaataaaacacccctttataaagctaaaacactacatggtgtctttatcttcattgcagaaggtgttcttgacaagccatgtggttgttctttgttgtgggctcatttgtttcaaactttacagaagttcgtttcttgtggcatgaaagattttatcttaactcagtattttattgctgcattataaaactcagtaaaacaaaaataattatcaaagcaagatggctataaaaaagaattaattaaaaaaatattgttttaattattttacaaataaatcacgttcttctctctctatgtatatttattttattgcacaatggatggattttccgatctatccaggttgagtctggaaaccaaaactagggtacaagaattcacccgtagaataacttaaaataacctccgtctgcaccacaactttatatttgcatatggccgaaaacaagcagagccgatcactaacttggccctaaacaataatttgtcagccataagtggtccatgctatcatttccatgactccagcaagagtaattttgatttcttgttaataatagtgcttgttgctatttccatgattcttcatcatcactaatcttgtgattccttgttaacaatagtccttgttgctatttccatgattctccctgacgtgttttatatgatcatccaaaactaatcatcagcttcacttggttttatttttttcgacgcgatccttggacagaagacctatagttaccggccagcctttaatttcttatcccctatgggccaagatttattgttgaagacaagctagcttcactattttcatatctctaccactcaaaaaacagaagaaaaaaggttcatagaaccaaataccaaaacatggcaacttcagctccacttatctcaaaatcccagttatcgtccggcatagaaaccttggatcatcaggagcaacactcgctagatgacaccatcgaaaaatacatagaaggttttggaccggcacaatatctgcaagtcatccttgtgtcattggcatttctgttcgatggacagcaaaccttcattagtgacttttctgatgctgtaccctcatggcactgcactgattttagtaatcaaacttgttactcgagctccaatttttgcaatctctcaaacactgaatgggcctgggatgagccagccagctcatcgatagtttccgattgggcccttgaatgtggcagttcagtcatcgtcggcttaccggcttcaagttactttgtgggctccctgattggtggatttactcttgctacgcttgctgattcctggcttggtagaaagaagttgctcttcctaacttgtatgggtatgtccacaatggcacttatcactgccttctccaccaatgtgtggatctattcaggtttgagatttgttagtggactttttcgcgcatcaattggaacgtgtgttgttgtgatgtcaacagaaatggcagggaagaaatcgggtggatttgtaagggtggtgggcttcttgttttttgctctaggagcactctcactgccccttatagcttacttgaatagaggttctccatggagatatctttacatttatacctctattccagccatcgtttactgtataatagcttatttctttgttagtgagtctccaagatggctttgcatgcggggacgtgaagctgaagcagttgcaattctgaataaaatggttccaacaaaaaatattagtagctctattctaaaatctgcctacaagcccctcgaccatgagcagtcgaatcttgacatatattcatcgatgaagagcttgctggagaggagatgggctttgaaaaggttgttggctgcaatgactcttggttttggtgtgggaatggtatactatggcatgttcttgggggttggaagcttgggtttcaacatctaccttagcgtgacacttactgcatccttgaccataccttctattcttttgctcccttatgtaatagaaagatttaataggagaagttcagttgtggcctttggtatagcaagtggggtatgtagcattgtctgtgcaataattggtgaagaactaaagactgtccagattatcatgtctttagcatctgctttctgctcgtgtgctgcacttaacgtcctgcaaatatacactacagagttgttccctacttgtgtaaggatttcagccacatcaatgtttaggcaagctataaacttcggtcccatatttgttccactgttagtttcagctgccaggagaaataattctgtagtttatggagtctttggatcagtagaaatatcctgtatcttctttgtaatcttcttgccagagaccaggggtttgtcactttccaacgccatggatgaacaagagaagaaggataatgcaaacgcgtatgtaagctgattataaaatctttatgggtgtctggtaagaaattgaagaagtcaaatcatttatgtatgcatctagctacttttaatattacttctgattaattctctattttcccgcttggaaactgtccgctattaaattttcctctctctttttttttctctccttctcctgtaatttgtttgcatttttgctagatgatacaattggggtagcaacttaattagcaatcaagtttggtctagagcaacatgcagtactcatcaaacagttgatgatctccattaaaccatttggttgacaactagcaagttctgatgggccaactattggcaaatccatggctgatcgacgacttttgcccaccgccgattgcccagtactggcaaacagtcgtcctgtgtatatgtttttcttttttgttaccaagaaaggaaatgtctggctgtgttcttaactacgctctataacactgttttcatgcttttaagtatgccagactacaattctgaacactttgttagcatatctccacctaagtttgaattcatcaatacaccccaacaaatctccgctctcgggaacatataacttgataaattgttaaattaagatattgtgggagggggaaacaattttatatacagattatttatgattacacctcctactcaagcggcactaggaatttttctaccgttcaaagactgattcaataatcaataccactaggaattcaataatctaattaatgatcaccgtcctcgtggttctaattaattatgttgtagccattttgcccaaagtatttctctcatcgaaaagttcatcatgttttgccagtgaaggaatttgagaaaattatctagtacttgatttcttatcagtatactctaaattagcaatatcataattagagctaaaataatattattatcagagatgaaaaaactataaatattccacatgtaaatagcaaatgcagagaatgctggcaattctagactgctaaaatagcttgtgcaaatttgttttgattctaaaaataataataataataataataataattaaggagtgggagaacaatccaagtagcttgtagcaacggtgagcgcataatagccttttccctctcttactcgcccaatccatcgaattgcagagaactccacttattgttttgatataatagttttgatataattatacaattaatttaagacgaaagaacactagctaaaattaagattttactaattggaatattcttcttgctaaaaaaattccagattgtaattttagatttgagtgctctctagtttttagccacgcaatttgtagcgtcagactaaacaatagtaaattctatcgtcaccagggcacaacgtgtaaaagcctttaccaaacactctcgttccaagcgagatataaatgatggttacaggcagggagcattgagcaattggtaggtctaaacaagcttaattcatttttgatgtgtttcatttaaaaaaaaattaaattaatatttttattgctttttaataattttaatatgctcatattaaaaatatcatgcatctaccaatcataatgtaaagcattaatttaacccagcaatccactagagtaattgattgggcccattttttaattaattaactgtccgccacctaaagggttacattatcccacatcgaaaaagggaaaaatttggacacctccaactattgtggaatttttatttatatattatatttatttcgtgaatctcaagaactataacatgccaattcatagtcaaaattccatgcttgctatatgctgtagcgataagtttatttatggagattccgaaaataaaaaaaggtttatttatggattaagaacggatgttacgagtcatccaccatttctgtgatattatctcgctattgtgctaatccagattcttcatatatattattattttaataaattgatgtaaaaaataatttttaaaaataaaaaatatatattatttttatatattttcaaattattttttttaaataactatatttataatactatatatctctatgctaatatatcaaaataatattttttttattttttttaattattttttacatcaacgtatcaaaatgatttaaaaacactaaaaaaaattaattttttaaaataatacttttaaaacccaaaaacatacactatcttaatagtttatatttcaacacaatttattgaatttgagataattattgcccaacatctcttccacggctttactcaatattgcggaaacatgataacaagctgaaagccaccgttgttgctggttttttgaacttgtcaatatgacttgaattgccgatgaaatttcctgctgcacgcaaacgggttcttcaaattgtggcaagtgtgcgccaaaacaagtcgccatcataataatctttcctgtttttttgaagtatattggtcccgtggaatatgtagatgtagcatgttagtggaattaaagatgcaaaggattgattgacgaaagacgacgggtcatgaatatatgtcgacaaagaaatcttctggaccatttaccttgcattaaggactctttatttatcggatatataattcttttggccaataacataagattagtttaaaaaaaaattatcaatgtgttgcgagtaattagttaaaagtcttatattatgttagatttgaatctatagagatgagctttagttttttgaccttcacatacattttgtttaaaaagatgaagctttgcatatataaatttttttaaaataaatatctaaagaaatatctataaaatatttaatataaatatctaacttataagatatttaatataaatattttatatgtgtgtgtgttgtgtaaaacatatatatgtgtacaaaattttattttattttttaatgtataattagagcttccaaatcttgcaaacggatgtctatgagaaaaaataagagggaaaatacttataatggataatacttactatcatcacatgtcaatcttcttctgtccaaggaaatcaaaaattgtttttttttttattaaaaaggaaagcaacttttagagagtactagttattgataattattatcgacctgagtctgacacacatattttacacacagatcagcataccattaatgaaattttctattgccttgtacagttagatgtattattattattattattaatttaatcgcccgcccatggtctctgtgacattgacatggatacacatcacagaacaaccgatggattctaaatagataggtttccagctcatatctagtccgaattcagatattcacatgtaattaatttattagatccagcttgtttaaaaaataaatttaatatgatatattttttaatattaagattgaaatatatttaatggacttgattatcaaggcttaatctatcaaatctgcaatttagattataaagtttaaaattttatttttaaaaaactattttttacttagctatacaataataaaaatagatgctcgtaaaatgaagtacaaatcaaatacatggttatttctttaagattcttataaccttataaaaatgaaattgaaaaatttattaaacaaatttaaaattaaataaatattaaaaagtaaaatggaaaaaaaaataaaaaagaggaaaataaaaaaaagcaaaaaaaaacacctcttttaccggataagttgacacccaactattttaatatagcaagtaatattaatagttttcacatagcattgtttaatagtgaaaaatattttatagttaattatcaatattgattttataaatctattttaatataaaaaaacatgtacaaatataaaataaatcatgataaaaatatctatatttaattttatttatatgaaattttctcttatatatatatatatatatatatatatatatatatatatatgtataatttgtatgtaaggtaagaaggttaattgttcctacccgttatctagaataatccatggcgtcacatatgagttgctgatctggcacatagttatgataccatgtgctgttctccgccactcttctattttaagttcttccaaaatcattagtaacaannnnnnnnnnnnnnnnnnnnnnnnnnnnnnnnnnnnnnnnnnnnnnnnnnatgtatgcatctagctacttttaatattacttctgattaattctctattttcccgcttggaaactgtccgctattaaattttcctctctctttttttttctctccttctcctgtaatttgtttgcatttttgctagatgatacaattggggtagcaacttaattagcaatcaagtttggtctagagcaacatgcagtactcatcaaacagttgatgatctccattaaaccatttggttgacaactagcaagttctgatgggccaactattggcaaatccatggctgatcgacgacttttgcccaccgccgattgcccagtactggcaaacagtcgtcctgtgtatattttttttgagaagtatatgatttcattgaacaccataatctgatggcatgtgaaattacaaagcctgtagcatatcaattttgcaggaattaccaaacaaaacaagatccatataaagaggacaaaacaacagatatagcctaaaaaaataacagtagaatctacacaaaatagccatcacaacaaaatccaggggaaactttcaagagtctccagttcatctctctagtgaatctaaacctctaaaatagagcacttttagcagcctgataaacataagttgagaaattgatcaaaaccaagcaaaaaaatcactggatcgtcctgtgtatatgtttttcttttttgtcaccaagaaaggaaatgtctggctgtgttcttaactacgctctataacactgttttcatgcttttaagtatgccagactacaattctgaacactttgttagcatatctccacctaagtttgaattcatcaatacaccccaacaaatctccgctctcgggaacatataacttgataaattgttaaattaagatattgtgggagggggaaacaattttatatacagattatttatgattacacctcctactcaagcggcactaggaatttttctaccgttcaaagactgattcaataatcaataccactaggaattcaataatctaattaatgatcaccgtcctcgtggttctaattaattatgttgtagccattttgcccaaagtatttctctcatcgaaaaggtcatcatgttttgccagtgaaggaatttaagaaaattatctagtacttgatttcttatcagtatactctaaattagcaatatcataattagagctaaaataatattattatcagagatgaaaaaactataaatattccacatgtaaatagcaaatgcagagaatgctggcaattctagactgctaaaatagcttgtgcaaatttgttttgattctaaaaataataataataataataataataattaaggagtgggagaacaatccaagtagcttgtagcaacggtgagcgcataatagccttttccctctcttactcgcccaatccatcgaattgcagagaactccacttattgttttgatataatagttttgatataattatacaattaatttaagacgaaagaacactagctaaaattaagattttactaattggaatattcttcttgctaaaaaaattccagattgtaattttagatttgagtgctctctagtttttagccacgcaatttgtagcgtcagactaaacaatagtaaattctatcgtcaccagggcacaacgtgtaaaagcctttaccaaacactctcgttccaagcgagatataaatgatggttacaggcagggagcattgagcaattggtaggtctaaacaagcttaattcatttttgatgtgtttcatttaaaaaaaaattaaattaatatttttattgctttttaataattttaatatgctcatattaaaaatatatctaccaatcataatgtaaagcattaatttaacccagcaatccactagagtaattgattgggcccattttttaattaattaactgtccgccacctaaagggttacattatcccacatcgaaaaagggaaaaatttggacacctccaactattgtggaatttttatttatatattatatttatttcgtgaatctcaagaactataacatgccaattcatagtcaaaattccatgcttgctatatgctgtagcgataagtttatttatggagattccgaaaataaaaaaggtttatttatggataaagaacggatgttacgagtcatccaccatttctgtgatattatctcgctattgtgctaatccagattcttcatatatattattattttaataaattgatgtaaaaaataatttttaaaaataaaaaatatatattatttttatatattttcaaattattttttttaaataactatatttataatactatacatctctatgctaatatatcaaaataatattttttttattttttttaattattttttatatcaacgtatcaaaatgatttaaaaacactaaaaaaaattaattttttaaaataatatttttaaaacccaaaatcatacaatatcttaatagtttatatttcaacacaattattgaatttgagataattattgcccaacatctcttccacggctttactcaatattgcggaaacatgataacaagctgaaagccaccgttgttgctggttttttgaacttgtcaatatgacttgaattgccgatgaaatttcctgctgcacgcaaacgggttcttcaaattgtggcaagtgtgcgccaaaacaagtnnnnnnnnnnnnnnnnnnnnnnnnnnnnnnnnnnnnnnnnnnnnnnnnnnnnnnnnnnnnnnnnnnnnnnnnnnnnnnnnnnnnnnnnnnnnnnnnnnnnnnnnnnnnnnnnnnnnnnnnnnnnnnnnnnnnnnnnnnnnnnnnnnnnnnnnnnnnnnnnnnnnnnnnnnnnnnnnnnnnnnnnnnnnnnnnnnnnnnnnnnnnnnnnnnnnnnnnnnnnnnnnnnnnnnnnnnnnnnnnnnnnnnnnnnnnnnnnnnnnnnnnnnnnnnnnnnnnnnnnnnnnnnnnnnnnnnnnnnnnnnnnnnnnnnnnnnnnnnnnnnnnnnnnnnnnnnnnnnnnnnnnnnnnnnnnnnnnnnnnnnnnnnnnnnnnnnnnnnnnnnnnnnnnnnnnnnnnnnnnnnnnnnnnnnnnnnnnnnnnnnnnnnnnnnnnnnnnnnnnnnnnnnnnnnnnnnnnnnnnnnnnnnnnnnnnnnnnnnnnnnnnnnnnnnnnnnnnnnnnnnnnnnnnnnnnnnnnnnnnnnnnnnnnnnnnnnnnnnnnnnnnnnnnnnnnnnnnnnnnnnnnnnnnnnnnnnnnnnnnnnnnnnnnnnnnnnnnnnnnnnnnnnnnnnnnnnnnnnnnnnnnnnnnnnnnnnnnnnnnnnnnnnnnnnnnnnnnnnnnnnnnnnnnnnnnnnnnnnnnnnnnnnnnnnnnnnnnnnnnnnnnnnnnnnnnnnnnnnnnnnnnnnnnnnnnnnnnnnnnnnnnnnnnnnnnnnnnnnnnnnnnnnnnnnnnnnnnnnnnnnnnnnnnnnnnnnnnnnnnnnnnnnnnnnnnnnnnnnnnnnnnnnnnnnnnnnnnnnnnnnnnnnnnnnnnnnnnnnnnnnnnnnnnnnnnnnnnnnnnnnnnnnnnnnnnnnnnnnnnnnnnnnnnnnnnnnnnnnnnnnnnnnnnnnnnnnnnnnnnnnnnnnnnnnnnnnnnnnnnnnnnnnnnnnnnnnnnnnnnnnnnnnnnntcttaggagtagaggttcaacagagctgtgaaggaatacatttatgtcaaatgaagtatgctggggaaattttagaaagatttggaatgggaggctgcaatccagtaaaaaatcctatcgtgccaggcacgaaattaataaaagatggtggagaagatagtgagaattcaaccttgtttaagcaaataattggcagcttaatgtatctgtcagttaccagacctgacatagcgtttgttgtctgcatgttaagcaaattcatgactgatcctaaaacatcacatatggcagcagcaaaaagggttctcaggtatgtgaagggaactaccagcttaggagtgttttatagaagaagtgcagagaattctgaagatgatctcaaagtctacactgacagtgactatgccggcgatgtagaggatagaagaagcacgtctggttatgttttttttctaagtgaaggtgcagttgcatggagctcaagaaagcaaccagtggtgactctctccacaacagaagcagagtatgtagctgctgctgcatgtgcatgtcatagtatttggatgaaaagagtgctcaacagtcttggtttctcttcctgcaagtgtgttaagattttttgcgacaacagttccactataaagttatcaaaaaatccaattctccatggaagaacaaaacacatagacgtgaaatttcattttttacgtgatctggtaaaggaaggtgctgtagaattaattcattgtgggactcgtgagcaagtggcagacatcttgacaaaacctttgaagttggaatcatttacaaggctacgtgatctgttgggaatgcagagcatcaaaactataaactgacttgttagcaagtgcagtttaggggaggatatgttggaaaccagttgttttcgttagaataaagctcctgtcttttaggagccagtaagttagtttgttagtgcaagtcagtatagtttgttagtgctgactatgactaagtcattgttttgtaatttttctgttgttctgttaccacaatcttcggctaagaagatgtggtttgtttttccctgattccaagttgtaatggttatttaagccaaaggaacactactgaataaagtgtattttcacagttaaattgtgcaagatctttgatattataacaattggtatcagagcctcttaacaaggcctgactgtgaatacaagagtgaaaagaaagatttgagtgtttctttaaaatgacagaaggaagcagcaacagctatgtgcctaagtttgtgggacactatgatcattgggctgaactgatggaaaatctgcttcgttccaaagagtattggaatgttgtagatcgtggcatcatggtggatgtcacaggagaagcaaggtctttctcctcagtcgtatcagaaagtcgtccactcacagatgttcaaaggaaggagtatgaagaaaacaagctaaaagatttaaaggcaaagaatcttttgtatcaagcaattgaacgagacatgcttgaaaccattcttgacagaagctcttcaaannnnnnnnnnnnnnnnnnnnnnnnnnnnnnnnnnnnnnnnnnnnnnnnnnacttctactaatggcttacgttcaggacaagaaaacaagcaaagaagaggtctggtttctagactcaggatgctctaatcacatgtcaggaaataaagattggtttatagaaatggatgagcagttcagacactcagtcaagctgggcaatggagcaaaaatgatggtgatgggtaaaggaagtgttaaacttgtgactgcaggactaactcaagtagtaagagatgtatttttcattcctgagcttaagaacaacctattaagcattggacagcttcaagagaagggacttgctattgttatgaaggataaggcttgtaaaatatatcatcctacgagaggccttattatgcaaactcttatggcagcaaataggatgtttattttactagccactatgattactcaaccttcaaactgtttaatagcaagtatggatgacttatcagacctgtggcatcgtcgctatggccatgtgaacaacaagagtctcaaaaccttggagagcaaacaacttgtcaaaggccttccaaaattcaaagcaacaaacacagcatgcacagtgtgtcatcgtggcaaacaacatcgagcagtcattcccaagaagagtcaatggaaagcttcaagaagacttcaactagtgcatgcagatttgtgtggtccaatcactccaacttcaaacagtttaaaaaggtacttattgtgctttatagatgatttcagcagaaaagcttggatttattttttagccgagaagagtgaaacttttgccatgtttaaagtatttaaaagctttgtggaaaaagaatcagaatgtgatatatgctgtttgaggacagacaggggaggagagtttacttccaaagaattcaatgtgttttgtgttaatcatggcatcaagaggcaacttactactgcctacactcctcaacagaatggagtggcagaacgtaaaaatcgaactatattaaacatggttcgatgcctgctttcagagaaggaaatgcctaaactgttctggccagaagcagttcgatggggactgcatgtgttaaataggagtctaactgtggctgtcaaagaaaagactcctgaagagtgttggagtggaaacaaacccaatgttgagtactttagaattttcggctgtattgcaaatgtgcatattcctgacagagggaggataaagttagatgagaagagtcatagatgtgtgtttataggtgttagtgaagaatctaaagcctatcggctttatgatcctaagaccaaaaaggtgattgttagtagggatgtagtgtttgatgagaatgagggctggaattggaggaagagtgatgatggtgtgagtgatatttttacttgggaagatacagataatgatggagaaattagtgattatgatgagaaatcagtagaaggagatgatttgggtacagagggagttgaaaatgataatgaaatagaaggtggaaatgatgatactgtattaggggagaatgttgaggtactggaagatgaagatggtgacacttcaggggaaaatggtcttgctgcaccagaaaatgatacaccaggggaaaataattcttctatatctcaaggaagaattaaacggacacctagatggatggatgattatgttcatggagctggttttcctgacgactcaatgtgctttatggtacatgatgatccaatatgctttgatgaagcagtaaaacagaagaaatggaggaaagccatggatttggaaatggaagctatagtaaagaacaagacatgggagctagtgattccaccagaagggataaagagaattggtgtaaaatggatttttcgaaccaagctgaatgaaaagggagaggtagataaatgcaaagcacacttggtagtaaaaggatatgctcagagacatgggatcgactacagtgaagtttttgcacctgtggctcgttgggacaccataaggctaatcttagctttagcagcatagaaaggatggactgttttccagctagacgtcaagagtgcatttcttcatggggaattagaggaagctgtctatgtggagcagccagaaggctatgttagcaaaggagaagagcataaagtgttgaaacttaaaaaagctctttacggcttgaaacaggctccaagagcctggtatagtagaattgaagggttcttcatgaaggaaggctttgagaaatgcagtcatgaacacacactgtttcttaaacatacagatggaggtaaatgcttaattattagcctttatgtagacgatttaatttatacaggacatgatgtggagctatgtgagaaattcaaggaatcaatgaaactagaatttgatatgagtgatttggggaaaatgaagtattcttaggagtagaggttnnnnnnnnnnnnnnnnnnnnnnnnnnnnnnnnnnnnnnnnnnnnnnnnnnnnnnnnnnnnnnnnnnnnnnnnnnnnnnnnnnnnnnnnnnnnnnnnnnnnnnnnnnnnnnnnnnnnnnnnnnnnnnnnnnnnnnnnnnnnnnnnnnnnnnnnnnnnnnnnnnnnnnnnnnnnnnnnnnnnnnnnnnnnnnnnnnnnnnnnnnnnnnnnnnnnnnnnnnnnnnnnnnnnnnnnnnnnnnnnnnnnnnnnnnnnnnnnnnnnnnnnnnnnnnnnnnnnnnnnnnnnnnnnnnnnnnnnnnnnnnnnnnnnnnnnnnnnnnnnnnnnnnnnnnnnnnnnnnnnnnnnnnnnnnnnnnnnnnnnnnnnnnnnnnnnnnnnnnnnnnnnnnnnnnnnnnnnnnnnnnnnnnnnnnnnnnnnnnnnnnnnnnnnnnnnnnnnnnnnnnnnnnnnnnnnnnnnnnnnnnnnnnnnnnnnnnnnnnnnnnnnnnnnnnnnnnnnnnnnnnnnnnnnnnnnnnnnnnnnnnnnnnnnnnnnnnnnnnnnnnnnnnnnnnnnnnnnnnnnnnnnnnnnnnnnnnnnnnnnnnnnnnnnnnnnnnnnnnnnnnnnnnnnnnnnnnnnnnnnnnnnnnnnnnnnnnnnnnnnnnnnnnnnnnnnnnnnnnnnnnnnnnnnnnnnnnnnnnnnnnnnnnnnnnnnnnnnnnnnnnnnnnnnnnnnnnnnnnnnnnnnnnnnnnnnnnnnnnnnnnnnnnnnnnnnnnnnnnnnnnnnnnnnnnnnnnnnnnnnnnnnnnnnnnnnnnnnnnnnnnnnnnnnnnnnnnnnnnnnnnnnnnnnnnnnnnnnnnnnnnnnnnnnnnnnnnnnnnnnnnnnnnnnnnnnnnnnnnnnnnnnnnnnnnnnnnnnnnnnnnnnnnnnnnnnnnnnnnnnnnnnnnnnnnnnnnnnnnnnnnnnnnnnnnnnnnnnnnnnnnnnnnnnnnnnnnnnnnnnnnnnnnnnnnnnnnnnnnnnnnnnnnnnnnnnnnnnnnnnnnnnnnnnnnnnnnnnnnnnnnnnnnnnnnnnnnnnnnnnnnnnnnnnnnnnnnnnnnnnnnnnnnnnnnnnnnnnnnnnnnnnnnnnnnnnnnnnnnnnnnnnnnnnnnnnnnntggaatcatttacaaggctacgtgatctgttgggaatgcagagcatcaaaactataaactgacttgttagcaagtgcagtttaggggaggatatgttggaaaccagttgttttcgttagaataaagctcctgtctttcaggagccagtaagttagtttgttagtgcaagtcagtatagtttgttagtgctgactatgactaagtcattgttttgtaatttttctgttgttctgttaccacaatcttcggctaagaagatgtggtttgtttttccctgattccaagttgtaatggctatttaagccaaaggaacactactgaataaagtgtattttcacagttaaattgtgcaagatctttgatattataacaagtttcagtgggtcgataaagaacgggtcaggctcggtgtggagctggcctcttggcctgttgggtttggtggttaattagttaatcgattaatcaattagttccctgactggttaattgcctgattgtaagataccgttcgccggtgctctgcattttgttttcttttgcggaaaaaaaaaaacattcgcctagtaatttcactcatctactccggaaacaactctggtattttagaattttccatcatttttaattatgtccacttaaattaagtaatttttattaattagcaatcatataaaaattagtatttaaatgatttaaaaaaataagnnnnnnnnnnnnnnnnnnnnnnnnnnnnnnnnnnnnnnnnnnnnnnnnnnnnnnnnnnnnnnnnnnnnnnnnnnnnnnnnnnnnnnnnnnnnnnnnnnnnnnnnnnnnnnnnnnnnnnnnnnnnnnnnnnnnnnnnnnnnnnnnnnnnnnnnnnnnnnnnnnnnnnnnnnnnnnnnnnnnnnnnnnnnnnnnnnnnnnnnnnnnnnnnnnnnnnnnnnnnnnnnnnnnnnnnnnnnnnnnnnnnnnnnnnnnnnnnnnnnnnnnnnnnnnnnnnnnnnnnnnnnnnnnnnnnnnnnnnnnnnnnnnnnnnnnnnnnnnnnnnnnnnnnnnnnnnnnnnnnnnnnnnnnnnnnnnnnnnnnnnnnnnnnnnnnnnnnnnnnnnnnnnnnnnnnnnnnnnnnnnnnnnnnnnnnnnnnnnnnnnnnnnnnnnnnnnnnnnnnnnnnnnnnnnnnnnnnnnnnnnnnnnnnnnnnnnnnnnnnnnnnnnnnnnnnnnnnnnnnnnnnnnnnnnnnnnnnnnnnnnnnnnnnnnnnnnnnnnnnnnnnnnnnnnnnnnnnnnnnnnnnnnnnnnnnnnnnnnnnnnnnnnnnnnnnnnnnnnnnnnnnnnnnnnnnnnnnnnnnnnnnnnnnnnnnnnnnnnnnnnnnnnnnnnnnnnnnnnnnnnnnnnnnnnnnnnnnnnnnnnnnnnnnnnnnnnnnnnnnnnnnnnnnnnnnnnnnnnnnnnnnnnnnnnnnnnnnnnnnnnnnnnnnnnnnnnnnnnnnnnnnnnnnnnnnnnnnnnnnnnnnnnnnnnnnnnnnnnnnnnnnnnnnnnnnnnnnnnnnnnnnnnnnnnnnnnnnnnnnnnnnnnnnnnnnnnnnnnnnnnnnnnnnnnnnnnnnnnnnnnnnnnnnnnnnnnnnnnnnnnnnnnnnnnnnnnnnnnnnnnnnnnnnnnnnnnnnnnnnnnnnnnnnnnnnnnnnnnnnnnnnnnnnnnnnnnnnnnnnnnnnnnnnnnnnnnnnnnnnnnnnnnnnnnnnnnnnnnnnnnnnnnnnnnnnnnnnnnnnnnnnnnnnnnnnnnnnnnnnnnnnnnnnnnnnnnnnnnnnnnnnnnnnnnnnnnnnnnnnnnnnnnnnnnnnnnnnnnnnnnnnnnnnnnnnnnnnnnnnnnnnnnnnnnnnnnnnnnnnnnnnnnnnnnnnnnnnnnnnnnnnnnnnnnnnnnnnnnnnnnnnnnnnnnnnnnnnnnnnnnnnnnnnnnnnnnnnnnnnnnnnnnnnnnnnnnnnnnnnnnnnnnnnnnnnnnnnnnnnnnnnnnnnnnnnnnnnnnnnnnnnnnnnnnnnnnnnnnnnnnnnnnnnnnnnnnnnnnnnnnnnnnnnnnnnnnnnnnnnnnnnnnnnnnnnnnnnnnnnnnnnnnnnnnnnnnnnnnnnnnnnnnnnnnnnnnnnnnnnnnnnnnnnnnnnnnnnnnnnnnnnnnnnnnnnnnnnnnnnnnnnnnnnnnnnnnnnnnnnnnnnnnnnnnnnnnnnnnnnnnnnnnnnnnnnnnnnnnnnnnnnnnnnnnnnnnnnnnnnnnnnnnnnnnnnnnnnnnnnnnnnnnnnnnnnnnnnnnnnnnnnnnnnnnnnnnnnnnnnnnnnnnnnnnnnnnnnnnnnnnnnnnnnnnnnnnnnnnnnnnnnnnnnnnnnnnnnnnnnnnnnnnnnnnnnnnnnnnnnnnnnnnnnnnnnnnnnnnnnnnnnnnnnnnnnnnnnnnnnnnnnnnnnnnnnnnnnnnnnnnnnnnnnnnnnnnnnnnnnnnnnnnnnnnnnnnnnnnnnnnnnnnnnnnnnnnnnnnnnnnnnnnnnnnnnnnnnnnnnnnnnnnnnnnnnnnnnnnnnnnnnnnnnnnnnnnnnnnnnnnnnnnnnnnnnnnnnnnnnnnnnnnnnnnnnnnnnnnnnnnnnnnnnnnnnnnnnnnnnnnnnnnnnnnnnnnnnnnnnnnnnnnnnnnnnnnnnnnnnnnnnnnnnnnnnnnnnnnnnnnnnnnnnnnnnnnnnnnnnnnnnnnnnnnnnnnnnnnnnnnnnnnnnnnnnnnnnnnnnnnnnnnnnnnnnnnnnnnnnnnnnnnnnnnnnnnnnnnnnnnnnnnnnnnnnnnnnnnnnnnnnnnnnnnnnnnnnnnnnnnnnnnnnnnnnnnnnnnnnnnnnnnnnnnnnnnnnnnnnnnnnnnnnnnnnnnnnnnnnnnnnnnnnnnnnnnnnnnnnnnnnnnnnnnnnnnnnnnnnnnnnnnnnnnnnnnnnnnnnnnnnnnnnnnnnnnnnnnnnnnnnnnnnnnnnnnnnnnnnnnnnnnnnnnnnnnnnnnnnnnnnnnnnnnnnnnnnnnnnnnnnnnnnnnnnnnnnnnnnnnnnnnnnnnnnnnnnnnnnnnnnnnnnnnnnnnnnnnnnnnnnnnnnnnnnnnnnnnnnnnnnnnnnnnnnnnnnnnnnnnnnnnnnnnnnnnnnnnnnnnnnnnnnnnnnnnnnnnnnnnnnnnnnnnnnnnnnnnnnnnnnnnnnnnnnnnnnnnnnnnnnnnnnnnnnnnnnnnnnnnnnnnnnnnnnnnnnnnnnnnnnnnnnnnnnnnnnnnnnnnnnnnnnnnnnnnnnnnnnnnnnnnnnnnnnnnnnnnnnnnnnnnnnnnnnnnnnnnnnnnnnnnnnnnnnnnnnnnnnnnnnnnnnnnnnnnnnnnnnnnnnnnnnnnnnnnnnnnnnnnnnnnnnnnnnnnnnnnnnnnnnnnnnnnnnnnnnnnnnnnnnnnnnnnnnnnnnnnnnnnnnnnnnnnnnnnnnnnnnnnnnnnnnnnnnnnnnnnnnnnnnnnnnnnnnnnnnnnnnnnnnnnnnnnnnnnnnnnnnnnnnnnnnnnnnnnnnnnnnnnnnnnnnnnnnnnnnnnnnnnnnnnnnnnnnnnnnnnnnnnnnnnnnnnnnnnnnnnnnnnnnnnnnnnnnnnnnnnnnnnnnnnnnnnnnnnnnnnnnnnnnnnnnnnnnnnnnnnnnnnnnnnnnnnnnnnnnnnnnnnnnnnnnnnnnnnnnnnnnnnnnnnnnnnnnnnnnnnnnnnnnnnnnnnnnnnnnnnnnnnnnnnnnnnnnnnnnnnnnnnnnnnnnnnnnnnnnnnnnnnnnnnnnnnnnnnnnnnnnnnnnnnnnnnnnnnnnnnnnnnnnnnnnnnnnnnnnnnnnnnnnnnnnnnnnnnnnnnnnnnnnnnnnnnnnnnnnnnnnnnnnnnnnnnnnnnnnnnnnnnnnnnnnnnnnnnnnnnnnnnnnnnnnnnnnnnnnnnnnnnnnnnnnnnnnnnnnnnnnnnnnnnnnnnnnnnnnnnnnnnnnnnnnnnnnnnnnnnnnnnnnnnnnnnnnnnnnnnnnnnnnnnnnnnnnnnnnnnnnnnnnnnnnnnnnnnnnnnnnnnnnnnnnnnnnnnnnnnnnnnnnnnnnnnnnnnnnnnnnnnnnnnnnnnnnnnnnnnnnnnnnnnnnnnnnnnnnnnnnnnnnnnnnnnnnnnnnnnnnnnnnnnnnnnnnnnnnnnnnnnnnnnnnnnnnnnnnnnnnnnnnnnnnnnnnnnnnnnnnnnnnnnnnnnnnnnnnnnnnnnnnnnnnnnnnnnnnnnnnnnnnnnnnnnnnnnnnnnnnnnnnnnnnnnnnnnnnnnnnnnnnnnnnnnnnnnnnnnnnnnnnnnnnnnnnnnnnnnnnnnnnnnnnnnnnnnnnnnnnnnnnnnnnnnnnnnnnnnnnnnnnnnnnnnnnnnnnnnnnnnnnnnnnnnnnnnnnnnnnnnnnnnnnnnnnnnnnnnnnnnnnnnnnnnnnnnnnnnnnnnnnnnnnnnnnnnnnnnnnnnnnnnnnnnnnnnnnnnnnnnnnnnnnnnnnnnnnnnnnnnnnnnnnnnnnnnnnnnnnnnnnnnnnnnnnnnnnnnnnnnnnnnnnnnnnnnnnnnnnnnnnnnnnnnnnnnnnnnnnnnnnnnnnnnnnnnnnnnnnnnnnnnnnnnnnnnnnnnnnnnnnnnnnnnnnnnnnnnnnnnnnnnnnnnnnnnnnnnnnnnnnnnnnnnnnnnnnnnnnnnnnnnnnnnnnnnnnnnnnnnnnnnnnnnnnnnnnnnnnnnnnnnnnnnnnnnnnnnnnnnnnnnnnnnnnnnnnnnnnnnnnnnnnnnnnnnnnnnnnnnnnnnnnnnnnnnnnnnnnnnnnnnnnnnnnnnnnnnnnnnnnnnnnnnnnnnnnnnnnnnnnnnnnnnnnnnnnnnnnnnnnnnnnnnnnnnnnnnnnnnnnnnnnnnnnnnnnnnnnnnnnnnnnnnnnnnnnnnnnnnnnnnnnnnnnnnnnnnnnnnnnnnnnnnnnnnnnnnnnnnnnnnnnnnnnnnnnnnnnnnnnnnnnnnnnnnnnnnnnnnnnnnnnnnnnnnnnnnnnnnnnnnnnnnnnnnnnnnnnnnnnnnnnnnnnnnnnnnnnnnnnnnnnnnnnnnnnnnnnnnnnnnnnnnnnnnnnnnnnnnnnnnnnnnnnnnnnnnnnnnnnnnnnnnnnnnnnnnnnnnnnnnnnnnnnnnnnnnnnnnnnnnnnnnnnnnnnnnnnnnnnnnnnnnnnnnnnnnnnnnnnnnnnnnnnnnnnnnnnnnnnnnnnnnnnnnnnnnnnnnnnnnnnnnnnnnnnnnnnnnnnnnnnnnnnnnnnnnnnnnnnnnnnnnnnnnnnnnnnnnnnnnnnnnnnnnnnnnnnnnnnnnnnnnnnnnnnnnnnnnnnnnnnnnnnnnnnnnnnnnnnnnnnnnnnnnnnnnnnnnnnnnnnnnnnnnnnnnnnnnnnnnnnnnnnnnnnnnnnnnnnnnnnnnnnnnnnnnnnnnnnnnnnnnnnnnnnnnnnnnnnnnnnnnnnnnnnnnnnnnnnnnnnnnnnnnnnnnnnnnnnnnnnnnnnnnnnnnnnnnnnnnnnnnnnnnnnnnnnnnnnnnnnnnnnnnnnnnnnnnnnnnnnnnnnnnnnnnnnnnnnnnnnnnnnnnnnnnnnnnnnnnnnnnnnnnnnnnnnnnnnnnnnnnnnnnnnnnnnnnnnnnnnnnnnnnnnnnnnnnnnnnnnnnnnnnnnnnnnnnnnnnnnnnnnnnnnnnnnnnnnnnnnnnnnnnnnnnnnnnnnnnnnnnnnnnnnnnnnnnnnnnnnnnnnnnnnnnnnnnnnnnnnnnnnnnnnnnnnnnnnnnnnnnnnnnnnnnnnnnnnnnnnnnnnnnnnnnnnnnnnnnnnnnnnnnnnnnnnnnnnnnnnnnnnnnnnnnnnnnnnnnnnnnnnnnnnnnnnnnnnnnnnnnnnnnnnnnnnnnnnnnnnnnnnnnnnnnnnnnnnnnnnnnnnnnnnnnnnnnnnnnnnnnnnnnnnnnnnnnnnnnnnnnnnnnnnnnnnnnnnnnnnnnnnnnnnnnnnnnnnnnnnnnnnnnnnnnnnnnnnnnnnnnnnnnnnnnnnnnnnnnnnnnnnnnnnnnnnnnnnnnnnnnnnnnnnnnnnnnnnnnnnnnnnnnnnnnnnnnnnnnnnnnnnnnnnnnnnnnnnnnnnnnnnnnnnnnnnnnnnnnnnnnnnnnnnnnnnnnnnnnnnnnnnnnnnnnnnnnnnnnnnnnnnnnnnnnnnnnnnnnnnnnnnnnnnnnnnnnnnnnnnnnnnnnnnnnnnnnnnnnnnnnnnnnnnnnnnnnnnnnnnnnnnnnnnnnnnnnnnnnnnnnnnnnnnnnnnnnnnnnnnnnnnnnnnnnnnnnnnnnnnnnnnnnnnnnnnnnnnnnnnnnnnnnnnnnnnnnnnnnnnnnnnnnnnnnnnnnnnnnnnnnnnnnnnnnnnnnnnnnnnnnnnnnnnnnnnnnnnnnnnnnnnnnnnnnnnnnnnnnnnnnnnnnnnnnnnnnnnnnnnnnnnnnnnnnnnnnnnnnnnnnnnnnnnnnnnnnnnnnnnnnnnnnnnnnnnnnnnnnnnnnnnnnnnnnnnnnnnnnnnnnnnnnnnnnnnnnnnnnnnnnnnnnnnnnnnnnnnnnnnnnnnnnnnnnnnnnnnnnnnnnnnnnnnnnnnnnnnnnnnnnnnnnnnnnnnnnnnnnnnnnnnnnnnnnnnnnnnnnnnnnnnnnnnnnnnnnnnnnnnnnnnnnnnnnnnnnnnnnnnnnnnnnnnnnnnnnnnnnnnnnnnnnnnnnnnnnnnnnnnnnnnnnnnnnnnnnnnnnnnnnnnnnnnnnnnnnnnnnnnnnnnnnnnnnnnnnnnnnnnnnnnnnnnnnnnnnnnnnnnnnnnnnnnnnnnnnnnnnnnnnnnnnnnnnnnnnnnnnnnnnnnnnnnnnnnnnnnnnnnnnnnnnnnnnnnnnnnnnnnnnnnnnnnnnnnnnnnnnnnnnnnnnnnnnnnnnnnnnnnnnnnnnnnnnnnnnnnnnnnnnnnnnnnnnnnnnnnnnnnnnnnnnnnnnnnnnnnnnnnnnnnnnnnnnnnnnnnnnnnnnnnnnnnnnnnnnnnnnnnnnnnnnnnnnnnnnnnnnnnnnnnnnnnnnnnnnnnnnnnnnnnnnnnnnnnnnnnnnnnnnnnnnnnnnnnnnnnnnnnnnnnnnnnnnnnnnnnnnnnnnnnnnnnnnnnnnnnnnnnnnnnnnnnnnnnnnnnnnnnnnnnnnnnnnnnnnnnnnnnnnnnnnnnnnnnnnnnnnnnnnnnnnnnnnnnnnnnnnnnnnnnnnnnnnnnnnnnnnnnnnnnnnnnnnnnnnnnnnnnnnnnnnnnnnnnnnnnnnnnnnnnnnnnnnnnnnnnnnnnnnnnnnnnnnnnnnnnnnnnnnnnnnnnnnnnnnnnnnnnnnnnnnnnnnnnnnnnnnnnnnnnnnnnnnnnnnnnnnnnnnnnnnnnnnnnnnnnnnnnnnnnnnnnnnnnnnnnnnnnnnnnnnnnnnnnnnnnnnnnnnnnnnnnnnnnnnnnnnnnnnnnnnnnnnnnnnnnnnnnnnnnnnnnnnnnnnnnnnnnnnnnnnnnnnnnnnnnnnnnnnnnnnnnnnnnnnnnnnnnnnnnnnnnnnnnnnnnnnnnnnnnnnnnnnnnnnnnnnnnnnnnnnnnnnnnnnnnnnnnnnnnnnnnnnnnnnnnnnnnnnnnnnnnnnnnnnnnnnnnnnnnnnnnnnnnnnnnnnnnnnnnnnnnnnnnnnnnnnnnnnnnnnnnnnnnnnnnnnnnnnnnnnnnnnnnnnnnnnnnnnnnnnnnnnnnnnnnnnnnnnnnnnnnnnnnnnnnnnnnnnnnnnnnnnnnnnnnnnnnnnnnnnnnnnnnnnnnnnnnnnnnnnnnnnnnnnnnnnnnnnnnnnnnnnnnnnnnnnnnnnnnnnnnnnnnnnnnnnnnnnnnnnnnnnnnnnnnnnnnnnnnnnnnnnnnnnnnnnnnnnnnnnnnnnnnnnnnnnnnnnnnnnnnnnnnnnnnnnnnnnnnnnnnnnnnnnnnnnnnnnnnnnnnnnnnnnnnnnnnnnnnnnnnnnnnnnnnnnnnnnnnnnnnnnnnnnnnnnnnnnnnnnnnnnnnnnnnnnnnnnnnnnnnnnnnnnnnnnnnnnnnnnnnnnnnnnnnnnnnnnnnnnnnnnnnnnnnnnnnnnnnnnnnnnnnnnnnnnnnnnnnnnnnnnnnnnnnnnnnnnnnnnnnnnnnnnnnnnnnnnnnnnnnnnnnnnnnnnnnnnnnnnnnnnnnnnnnnnnnnnnnnnnnnnnnnnnnnnnnnnnnnnnnnnnnnnnnnnnnnnnnnnnnnnnnnnnnnnnnnnnnnnnnnnnnnnnnnnnnnnnnnnnnnnnnnnnnnnnnnnnnnnnnnnnnnnnnnnnnnnnnnnnnnnnnnnnnnnnnnnnnnnnnnnnnnnnnnnnnnnnnnnnnnnnnnnnnnnnnnnnnnnnnnnnnnnnnnnnnnnnnnnnnnnnnnnnnnnnnnnnnnnnnnnnnnnnnnnnnnnnnnnnnnnnnnnnnnnnnnnnnnnnnnnnnnnnnnnnnnnnnnnnnnnnnnnnnnnnnnnnnnnnnnnnnnnnnnnnnnnnnnnnnnnnnnnnnnnnnnnnnnnnnnnnnnnnnnnnnnnnnnnnnnnnnnnnnnnnnnnnnnnnnnnnnnnnnnnnnnnnnnnnnnnnnnnnnnnnnnnnnnnnnnnnnnnnnnnnnnnnnnnnnnnnnnnnnnnnnnnnnnnnnnnnnnnnnnnnnnnnnnnnnnnnnnnnnnnnnnnnnnnnnnnnnnnnnnnnnnnnnnnnnnnnnnnnnnnnnnnnnnnnnnnnnnnnnnnnnnnnnnnnnnnnnnnnnnnnnnnnnnnnnnnnnnnnnnnnnnnnnnnnnnnnnnnnnnnnnnnnnnnnnnnnnnnnnnnnnnnnnnnnnnnnnnnnnnnnnnnnnnnnnnnnnnnnnnnnnnnnnnnnnnnnnnnnnnnnnnnnnnnnnnnnnnnnnnnnnnnnnnnnnnnnnnnnnnnnnnnnnnnnnnnnnnnnnnnnnnnnnnnnnnnnnnnnnnnnnnnnnnnnnnnnnnnnnnnnnnnnnnnnnnnnnnnnnnnnnnnnnnnnnnnnnnnnnnnnnnnnnnnnnnnnnnnnnnnnnnnnnnnnnnnnnnnnnnnnnnnnnnnnnnnnnnnnnnnnnnnnnnnnnnnnnnnnnnnnnnnnnnnnnnnnnnnnnnnnnnnnnnnnnnnnnnnnnnnnnnnnnnnnnnnnnnnnnnnnnnnnnnnnnnnnnnnnnnnnnnnnnnnnnnnnnnnnnnnnnnnnnnnnnnnnnnnnnnnnnnnnnnnnnnnnnnnnnnnnnnnnnnnnnnnnnnnnnnnnnnnnnnnnnnnnnnnnnnnnnnnnnnnnnnnnnnnnnnnnnnnnnnnnnnnnnnnnnnnnnnnnnnnnnnnnnnnnnnnnnnnnnnnnnnnnnnnnnnnnnnnnnnnnnnnnnnnnnnnnnnnnnnnnnnnnnnnnnnnnnnnnnnnnnnnnnnnnnnnnnnnnnnnnnnnnnnnnnnnnnnnnnnnnnnnnnnnnnnnnnnnnnnnnnnnnnnnnnnnnnnnnnnnnnnnnnnnnnnnnnnnnnnnnnnnnnnnnnnnnnnnnnnnnnnnnnnnnnnnnnnnnnnnnnnnnnnnnnnnnnnnnnnnnnnnnnnnnnnnnnnnnnnnnnnnnnnnnnnnnnnnnnnnnnnnnnnnnnnnnnnnnnnnnnnnnnnnnnnnnnnnnnnnnnnnnnnnnnnnnnnnnnnnnnnnnnnnnnnnnnnnnnnnnnnnnnnnnnnnnnnnnnnnnnnnnnnnnnnnnnnnnnnnnnnnnnnnnnnnnnnnnnnnnnnnnnnnnnnnnnnnnnnnnnnnnnnnnnnnnnnnnnnnnnnnnnnnnnnnnnnnnnnnnnnnnnnnnnnnnnnnnnnnnnnnnnnnnnnnnnnnnnnnnnnnnnnnnnnnnnnnnnnnnnnnnnnnnnnnnnnnnnnnnnnnnnnnnnnnnnnnnnnnnnnnnnnnnnnnnnnnnnnnnnnnnnnnnnnnnnnnnnnnnnnnnnnnnnnnnnnnnnnnnnnnnnnnnnnnnnnnnnnnnnnnnnnnnnnnnnnnnnnnnnnnnnnnnnnnnnnnnnnnnnnnnnnnnnnnnnnnnnnnnnnnnnnnnnnnnnnnnnnnnnnnnnnnnnnnnnnnnnnnnnnnnnnnnnnnnnnnnnnnnnnnnnnnnnnnnnnnnnnnnnnnnnnnnnnnnnnnnnnnnnnnnnnnnnnnnnnnnnnnnnnnnnnnnnnnnnnnnnnnnnnnnnnnnnnnnnnnnnnnnnnnnnnnnnnnnnnnnnnnnnnnnnnnnnnnnnnnnnnnnnnnnnnnnnnnnnnnnnnnnnnnnnnnnnnnnnnnnnnnnnnnnnnnnnnnnnnnnnnnnnnnnnnnnnnnnnnnnnnnnnnnnnnnnnnnnnnnnnnnnnnnnnnnnnnnnnnnnnnnnnnnnnnnnnnnnnnnnnnnnnnnnnnnnnnnnnnnnnnnnnnnnnnnnnnnnnnnnnnnnnnnnnnnnnnnnnnnnnnnnnnnnnnnnnnnnnnnnnnnnnnnnnnnnnnnnnnnnnnnnnnnnnnnnnnnnnnnnnnnnnnnnnnnnnnnnnnnnnnnnnnnnnnnnnnnnnnnnnnnnnnnnnnnnnnnnnnnnnnnnnnnnnnnnnnnnnnnnnnnnnnnnnnnnnnnnnnnnnnnnnnnnnnnnnnnnnnnnnnnnnnnnnnnnnnnnnnnnnnnnnnnnnnnnnnnnnnnnnnnnnnnnnnnnnnnnnnnnnnnnnnnnnnnnnnnnnnnnnnnnnnnnnnnnnnnnnnnnnnnnnnnnnnnnnnnnnnnnnnnnnnnnnnnnnnnnnnnnnnnnnnnnnnnnnnnnnnnnnnnnnnnnnnnnnnnnnnnnnnnnnnnnnnnnnnnnnnnnnnnnnnnnnnnnnnnnnnnnnnnnnnnnnnnnnnnnnnnnnnnnnnnnnnnnnnnnnnnnnnnnnnnnnnnnnnnnnnnnnnnnnnnnnnnnnnnnnnnnnnnnnnnnnnnnnnnnnnnnnnnnnnnnnnnnnnnnnnnnnnnnnnnnnnnnnnnnnnnnnnnnnnnnnnnnnnnnnnnnnnnnnnnnnnnnnnnnnnnnnnnnnnnnnnnnnnnnnnnnnnnnnnnnnnnnnnnnnnnnnnnnnnnnnnnnnnnnnnnnnnnnnnnnnnnnnnnnnnnnnnnnnnnnnnnnnnnnnnnnnnnnnnnnnnnnnnnnnnnnnnnnnnnnnnnnnnnnnnnnnnnnnnnnnnnnnnnnnnnnnnnnnnnnnnnnnnnnnnnnnnnnnnnnnnnnnnnnnnnnnnnnnnnnnnnnnnnnnnnnnnnnnnnnnnnnnnnnnnnnnnnnnnnnnnnnnnnnnnnnnnnnnnnnnnnnnnnnnnnnnnnnnnnnnnnnnnnnnnnnnnnnnnnnnnnnnnnnnnnnnnnnnnnnnnnnnnnnnnnnnnnnnnnnnnnnnnnnnnnnnnnnnnnnnnnnnnnnnnnnnnnnnnnnnnnnnnnnnnnnnnnnnnnnnnnnnnnnnnnnnnnnnnnnnnnnnnnnnnnnnnnnnnnnnnnnnnnnnnnnnnnnnnnnnnnnnnnnnnnnnnnnnnnnnnnnnnnnnnnnnnnnnnnnnnnnnnnnnnnnnnnnnnnnnnnnnnnnnnnnnnnnnnnnnnnnnnnnnnnnnnnnnnnnnnnnnnnnnnnnnnnnnnnnnnnnnnnnnnnnnnnnnnnnnnnnnnnnnnnnnnnnnnnnnnnnnnnnnnnnnnnnnnnnnnnnnnnnnnnnnnnnnnnnnnnnnnnnnnnnnnnnnnnnnnnnnnnnnnnnnnnnnnnnnnnnnnnnnnnnnnnnnnnnnnnnnnnnnnnnnnnnnnnnnnnnnnnnnnnnnnnnnnnnnnnnnnnnnnnnnnnnnnnnnnnnnnnnnnnnnnnnnnnnnnnnnnnnnnnnnnnnnnnnnnnnnnnnnnnnnnnnnnnnnnnnnnnnnnnnnnnnnnnnnnnnnnnnnnnnnnnnnnnnnnnnnnnnnnnnnnnnnnnnnnnnnnnnnnnnnnnnnnnnnnnnnnnnnnnnnnnnnnnnnnnnnnnnnnnnnnnnnnnnnnnnnnnnnnnnnnnnnnnnnnnnnnnnnnnnnnnnnnnnnnnnnnnnnnnnnnnnnnnnnnnnnnnnnnnnnnnnnnnnnnnnnnnnnnnnnnnnnnnnnnnnnnnnnnnnnnnnnnnnnnnnnnnnnnnnnnnnnnnnnnnnnnnnnnnnnnnnnnnnnnnnnnnnnnnnnnnnnnnnnnnnnnnnnnnnnnnnnnnnnnnnnnnnnnnnnnnnnnnnnnnnnnnnnnnnnnnnnnnnnnnnnnnnnnnnnnnnnnnnnnnnnnnnnnnnnnnnnnnnnnnnnnnnnnnnnnnnnnnnnnnnnnnnnnnnnnnnnnnnnnnnnnnnnnnnnnnnnnnnnnnnnnnnnnnnnnnnnnnnnnnnnnnnnnnnnnnnnnnnnnnnnnnnnnnnnnnnnnnnnnnnnnnnnnnnnnnnnnnnnnnnnnnnnnnnnnnnnnnnnnnnnnnnnnnnnnnnnnnnnnnnnnnnnnnnnnnnnnnnnnnnnnnnnnnnnnnnnnnnnnnnnnnnnnnnnnnnnnnnnnnnnnnnnnnnnnnnnnnnnnnnnnnnnnnnnnnnnnnnnnnnnnnnnnnnnnnnnnnnnnnnnnnnnnnnnnnnnnnnnnnnnnnnnnnnnnnnnnnnnnnnnnnnnnnnnnnnnnnnnnnnnnnnnnnnnnnnnnnnnnnnnnnnnnnnnnnnnnnnnnnnnnnnnnnnnnnnnnnnnnnnnnnnnnnnnnnnnnnnnnnnnnnnnnnnnnnnnnnnnnnnnnnnnnnnnnnnnnnnnnnnnnnnnnnnnnnnnnnnnnnnnnnnnnnnnnnnnnnnnnnnnnnnnnnnnnnnnnnnnnnnnnnnnnnnnnnnnnnnnnnnnnnnnnnnnnnnnnnnnnnnnnnnnnnnnnnnnnnnnnnnnnnnnnnnnnnnnnnnnnnnnnnnnnnnnnnnnnnnnnnnnnnnnnnnnnnnnnnnnnnnnnnnnnnnnnnnnnnnnnnnnnnnnnnnnnnnnnnnnnnnnnnnnnnnnnnnnnnnnnnnnnnnnnnnnnnnnnnnnnnnnnnnnnnnnnnnnnnnnnnnnnnnnnnnnnnnnnnnnnnnnnnnnnnnnnnnnnnnnnnnnnnnnnnnnnnnnnnnnnnnnnnnnnnnnnnnnnnnnnnnnnnnnnnnnnnnnnnnnnnnnnnnnnnnnnnnnnnnnnnnnnnnnnnnnnnnnnnnnnnnnnnnnnnnnnnnnnnnnnnnnnnnnnnnnnnnnnnnnnnnnnnnnnnnnnnnnnnnnnnnnnnnnnnnnnnnnnnnnnnnnnnnnnnnnnnnnnnnnnnnnnnnnnnnnnnnnnnnnnnnnnnnnnnnnnnnnnnnnnnnnnnnnnnnnnnnnnnnnnnnnnnnnnnnnnnnnnnnnnnnnnnnnnnnnnnnnnnnnnnnnnnnnnnnnnnnnnnnnnnnnnnnnnnnnnnnnnnnnnnnnnnnnnnnnnnnnnnnnnnnnnnnnnnnnnnnnnnnnnnnnnnnnnnnnnnnnnnnnnnnnnnnnnnnnnnnnnnnnnnnnnnnnnnnnnnnnnnnnnnnnnnnnnnnnnnnnnnnnnnnnnnnnnnnnnnnnnnnnnnnnnnnnnnnnnnnnnnnnnnnnnnnnnnnnnnnnnnnnnnnnnnnnnnnnnnnnnnnnnnnnnnnnnnnnnnnnnnnnnnnnnnnnnnnnnnnnnnnnnnnnnnnnnnnnnnnnnnnnnnnnnnnnnnnnnnnnnnnnnnnnnnnnnnnnnnnnnnnnnnnnnnnnnnnnnnnnnnnnnnnnnnnnnnnnnnnnnnnnnnnnnnnnnnnnnnnnnnnnnnnnnnnnnnnnnnnnnnnnnnnnnnnnnnnnnnnnnnnnnnnnnnnnnnnnnnnnnnnnnnnnnnnnnnnnnnnnnnnnnnnnnnnnnnnnnnnnnnnnnnnnnnnnnnnnnnnnnnnnnnnnnnnnnnnnnnnnnnnnnnnnnnnnnnnnnnnnnnnnnnnnnnnnnnnnnnnnnnnnnnnnnnnnnnnnnnnnnnnnnnnnnnnnnnnnnnnnnnnnnnnnnnnnnnnnnnnnnnnnnnnnnnnnnnnnnnnnnnnnnnnnnnnnnnnnnnnnnnnnnnnnnnnnnnnnnnnnnnnnnnnnnnnnnnnnnnnnnnnnnnnnnnnnnnnnnnnnnnnnnnnnnnnnnnnnnnnnnnnnnnnnnnnnnnnnnnnnnnnnnnnnnnnnnnnnnnnnnnnnnnnnnnnnnnnnnnnnnnnnnnnnnnnnnnnnnnnnnnnnnnnnnnnnnnnnnnnnnnnnnnnnnnnnnnnnnnnnnnnnnnnnnnnnnnnnnnnnnnnnnnnnnnnnnnnnnnnnnnnnnnnnnnnnnnnnnnnnnnnnnnnnnnnnnnnnnnnnnnnnnnnnnnnnnnnnnnnnnnnnnnnnnnnnnnnnnnnnnnnnnnnnnnnnnnnnnnnnnnnnnnnnnnnnnnnnnnnnnnnnnnnnnnnnnnnnnnnnnnnnnnnnnnnnnnnnnnnnnnnnnnnnnnnnnnnnnnnnnnnnnnnnnnnnnnnnnnnnnnnnnnnnnnnnnnnnnnnnnnnnnnnnnnnnnnnnnnnnnnnnnnnnnnnnnnnnnnnnnnnnnnnnnnnnnnnnnnnnnnnnnnnnnnnnnnnnnnnnnnnnnnnnnnnnnnnnnnnnnnnnnnnnnnnnnnnnnnnnnnnnnnnnnnnnnnnnnnnnnnnnnnnnnnnnnnnnnnnnnnnnnnnnnnnnnnnnnnnnnnnnnnnnnnnnnnnnnnnnnnnnnnnnnnnnnnnnnnnnnnnnnnnnnnnnnnnnnnnnnnnnnnnnnnnnnnnnnnnnnnnnnnnnnnnnnnnnnnnnnnnnnnnnnnnnnnnnnnnnnnnnnnnnnnnnnnnnnnnnnnnnnnnnnnnnnnnnnnnnnnnnnnnnnnnnnnnnnnnnnnnnnnnnnnnnnnnnnnnnnnnnnnnnnnnnnnnnnnnnnnnnnnnnnnnnnnnnnnnnnnnnnnnnnnnnnnnnnnnnnnnnnnnnnnnnnnnnnnnnnnnnnnnnnnnnnnnnnnnnnnnnnnnnnnnnnnnnnnnnnnnnnnnnnnnnnnnnnnnnnnnnnnnnnnnnnnnnnnnnnnnnnnnnnnnnnnnnnnnnnnnnnnnnnnnnnnnnnnnnnnnnnnnnnnnnnnnnnnnnnnnnnnnnnnnnnnnnnnnnnnnnnnnnnnnnnnnnnnnnnnnnnnnnnnnnnnnnnnnnnnnnnnnnnnnnnnnnnnnnnnnnnnnnnnnnnnnnnnnnnnnnnnnnnnnnnnnnnnnnnnnnnnnnnnnnnnnnnnnnnnnnnnnnnnnnnnnnnnnnnnnnnnnnnnnnnnnnnnnnnnnnnnnnnnnnnnnnnnnnnnnnnnnnnnnnnnnnnnnnnnnnnnnnnnnnnnnnnnnnnnnnnnnnnnnnnnnnnnnnnnnnnnnnnnnnnnnnnnnnnnnnnnnnnnnnnnnnnnnnnnnnnnnnnnnnnnnnnnnnnnnnnnnnnnnnnnnnnnnnnnnnnnnnnnnnnnnnnnnnnnnnnnnnnnnnnnnnnnnnnnnnnnnnnnnnnnnnnnnnnnnnnnnnnnnnnnnnnnnnnnnnnnnnnnnnnnnnnnnnnnnnnnnnnnnnnnnnnnnnnnnnnnnnnnnnnnnnnnnnnnnnnnnnnnnnnnnnnnnnnnnnnnnnnnnnnnnnnnnnnnnnnnnnnnnnnnnnnnnnnnnnnnnnnnnnnnnnnnnnnnnnnnnnnnnnnnnnnnnnnnnnnnnnnnnnnnnnnnnnnnnnnnnnnnnnnnnnnnnnnnnnnnnnnnnnnnnnnnnnnnnnnnnnnnnnnnnnnnnnnnnnnnnnnnnnnnnnnnnnnnnnnnnnnnnnnnnnnnnnnnnnnnnnnnnnnnnnnnnnnnnnnnnnnnnnnnnnnnnnnnnnnnnnnnnnnnnnnnnnnnnnnnnnnnnnnnnnnnnnnnnnnnnnnnnnnnnnnnnnnnnnnnnnnnnnnnnnnnnnnnnnnnnnnnnnnnnnnnnnnnnnnnnnnnnnnnnnnnnnnnnnnnnnnnnnnnnnnnnnnnnnnnnnnnnnnnnnnnnnnnnnnnnnnnnnnnnnnnnnnnnnnnnnnnnnnnnnnnnnnnnnnnnnnnnnnnnnnnnnnnnnnnnnnnnnnnnnnnnnnnnnnnnnnnnnnnnnnnnnnnnnnnnnnnnnnnnnnnnnnnnnnnnnnnnnnnnnnnnnnnnnnnnnnnnnnnnnnnnnnnnnnnnnnnnnnnnnnnnnnnnnnnnnnnnnnnnnnnnnnnnnnnnnnnnnnnnnnnnnnnnnnnnnnnnnnnnnnnnnnnnnnnnnnnnnnnnnnnnnnnnnnnnnnnnnnnnnnnnnnnnnnnnnnnnnnnnnnnnnnnnnnnnnnnnnnnnnnnnnnnnnnnnnnnnnnnnnnnnnnnnnnnnnnnnnnnnnnnnnnnnnnnnnnnnnnnnnnnnnnnnnnnnnnnnnnnnnnnnnnnnnnnnnnnnnnnnnnnnnnnnnnnnnnnnnnnnnnnnnnnnnnnnnnnnnnnnnnnnnnnnnnnnnnnnnnnnnnnnnnnnnnnnnnnnnnnnnnnnnnnnnnnnnnnnnnnnnnnnnnnnnnnnnnnnnnnnnnnnnnnnnnnnnnnnnnnnnnnnnnnnnnnnnnnnnnnnnnnnnnnnnnnnnnnnnnnnnnnnnnnnnnnnnnnnnnnnnnnnnnnnnnnnnnnnnnnnnnnnnnnnnnnnnnnnnnnnnnnnnnnnnnnnnnnnnnnnnnnnnnnnnnnnnnnnnnnnnnnnnnnnnnnnnnnnnnnnnnnnnnnnnnnnnnnnnnnnnnnnnnnnnnnnnnnnnnnnnnnnnnnnnnnnnnnnnnnnnnnnnnnnnnnnnnnnnnnnnnnnnnnnnnnnnnnnnnnnnnnnnnnnnnnnnnnnnnnnnnnnnnnnnnnnnnnnnnnnnnnnnnnnnnnnnnnnnnnnnnnnnnnnnnnnnnnnnnnnnnnnnnnnnnnnnnnnnnnnnnnnnnnnnnnnnnnnnnnnnnnnnnnnnnnnnnnnnnnnnnnnnnnnnnnnnnnnnnnnnnnnnnnnnnnnnnnnnnnnnnnnnnnnnnnnnnnnnnnnnnnnnnnnnnnnnnnnnnnnnnnnnnnnnnnnnnnnnnnnnnnnnnnnnnnnnnnnnnnnnnnnnnnnnnnnnnnnnnnnnnnnnnnnnnnnnnnnnnnnnnnnnnnnnnnnnnnnnnnnnnnnnnnnnnnnnnnnnnnnnnnnnnnnnnnnnnnnnnnnnnnnnnnnnnnnnnnnnnnnnnnnnnnnnnnnnnnnnnnnnnnnnnnnnnnnnnnnnnnnnnnnnnnnnnnnnnnnnnnnnnnnnnnnnnnnnnnnnnnnnnnnnnnnnnnnnnnnnnnnnnnnnnnnnnnnnnnnnnnnnnnnnnnnnnnnnnnnnnnnnnnnnnnnnnnnnnnnnnnnnnnnnnnnnnnnnnnnnnnnnnnnnnnnnnnnnnnnnnnnnnnnnnnnnnnnnnnnnnnnnnnnnnnnnnnnnnnnnnnnnnnnnnnnnnnnnnnnnnnnnnnnnnnnnnnnnnnnnnnnnnnnnnnnnnnnnnnnnnnnnnnnnnnnnnnnnnnnnnnnnnnnnnnnnnnnnnnnnnnnnnnnnnnnnnnnnnnnnnnnnnnnnnnnnnnnnnnnnnnnnnnnnnnnnnnnnnnnnnnnnnnnnnnnnnnnnnnnnnnnnnnnnnnnnnnnnnnnnnnnnnnnnnnnnnnnnnnnnnnnnnnnnnnnnnnnnnnnnnnnnnnnnnnnnnnnnnnnnnnnnnnnnnnnnnnnnnnnnnnnnnnnnnnnnnnnnnnnnnnnnnnnnnnnnnnnnnnnnnnnnnnnnnnnnnnnnnnnnnnnnnnnnnnnnnnnnnnnnnnnnnnnnnnnnnnnnnnnnnnnnnnnnnnnnnnnnnnnnnnnnnnnnnnnnnnnnnnnnnnnnnnnnnnnnnnnnnnnnnnnnnnnnnnnnnnnnnnnnnnnnnnnnnnnnnnnnnnnnnnnnnnnnnnnnnnnnnnnnnnnnnnnnnnnnnnnnnnnnnnnnnnnnnnnnnnnnnnnnnnnnnnnnnnnnnnnnnnnnnnnnnnnnnnnnnnnnnnnnnnnnnnnnnnnnnnnnnnnnnnnnnnnnnnnnnnnnnnnnnnnnnnnnnnnnnnnnnnnnnnnnnnnnnnnnnnnnnnnnnnnnnnnnnnnnnnnnnnnnnnnnnnnnnnnnnnnnnnnnnnnnnnnnnnnnnnnnnnnnnnnnnnnnnnnnnnnnnnnnnnnnnnnnnnnnnnnnnnnnnnnnnnnnnnnnnnnnnnnnnnnnnnnnnnnnnnnnnnnnnnnnnnnnnnnnnnnnnnnnnnnnnnnnnnnnnnnnnnnnnnnnnnnnnnnnnnnnnnnnnnnnnnnnnnnnnnnnnnnnnnnnnnnnnnnnnnnnnnnnnnnnnnnnnnnnnnnnnnnnnnnnnnnnnnnnnnnnnnnnnnnnnnnnnnnnnnnnnnnnnnnnnnnnnnnnnnnnnnnnnnnnnnnnnnnnnnnnnnnnnnnnnnnnnnnnnnnnnnnnnnnnnnnnnnnnnnnnnnnnnnnnnnnnnnnnnnnnnnnnnnnnnnnnnnnnnnnnnnnnnnnnnnnnnnnnnnnnnnnnnnnnnnnnnnnnnnnnnnnnnnnnnnnnnnnnnnnnnnnnnnnnnnnnnnnnnnnnnnnnnnnnnnnnnnnnnnnnnnnnnnnnnnnnnnnnnnnnnnnnnnnnnnnnnnnnnnnnnnnnnnnnnnnnnnnnnnnnnnnnnnnnnnnnnnnnnnnnnnnnnnnnnnnnnnnnnnnnnnnnnnnnnnnnnnnnnnnnnnnnnnnnnnnnnnnnnnnnnnnnnnnnnnnnnnnnnnnnnnnnnnnnnnnnnnnnnnnnnnnnnnnnnnnnnnnnnnnnnnnnnnnnnnnnnnnnnnnnnnnnnnnnnnnnnnnnnnnnnnnnnnnnnnnnnnnnnnnnnnnnnnnnnnnnnnnnnnnnnnnnnnnnnnnnnnnnnnnnnnnnnnnnnnnnnnnnnnnnnnnnnnnnnnnnnnnnnnnnnnnnnnnnnnnnnnnnnnnnnnnnnnnnnnnnnnnnnnnnnnnnnnnnnnnnnnnnnnnnnnnnnnnnnnnnnnnnnnnnnnnnnnnnnnnnnnnnnnnnnnnnnnnnnnnnnnnnnnnnnnnnnnnnnnnnnnnnnnnnnnnnnnnnnnnnnnnnnnnnnnnnnnnnnnnnnnnnnnnnnnnnnnnnnnnnnnnnnnnnnnnnnnnnnnnnnnnnnnnnnnnnnnnnnnnnnnnnnnnnnnnnnnnnnnnnnnnnnnnnnnnnnnnnnnnnnnnnnnnnnnnnnnnnnnnnnnnnnnnnnnnnnnnnnnnnnnnnnnnnnnnnnnnnnnnnnnnnnnnnnnnnnnnnnnnnnnnnnnnnnnnnnnnnnnnnnnnnnnnnnnnnnnnnnnnnnnnnnnnnnnnnnnnnnnnnnnnnnnnnnnnnnnnnnnnnnnnnnnnnnnnnnnnnnnnnnnnnnnnnnnnnnnnnnnnnnnnnnnnnnnnnnnnnnnnnnnnnnnnnnnnnnnnnnnnnnnnnnnnnnnnnnnnnnnnnnnnnnnnnnnnnnnnnnnnnnnnnnnnnnnnnnnnnnnnnnnnnnnnnnnnnnnnnnnnnnnnnnnnnnnnnnnnnnnnnnnnnnnnnnnnnnnnnnnnnnnnnnnnnnnnnnnnnnnnnnnnnnnnnnnnnnnnnnnnnnnnnnnnnnnnnnnnnnnnnnnnnnnnnnnnnnnnnnnnnnnnnnnnnnnnnnnnnnnnnnnnnnnnnnnnnnnnnnnnnnnnnnnnnnnnnnnnnnnnnnnnnnnnnnnnnnnnnnnnnnnnnnnnnnnnnnnnnnnnnnnnnnnnnnnnnnnnnnnnnnnnnnnnnnnnnnnnnnnnnnnnnnnnnnnnnnnnnnnnnnnnnnnnnnnnnnnnnnnnnnnnnnnnnnnnnnnnnnnnnnnnnnnnnnnnnnnnnnnnnnnnnnnnnnnnnnnnnnnnnnnnnnnnnnnnnnnnnnnnnnnnnnnnnnnnnnnnnnnnnnnnnnnnnnnnnnnnnnnnnnnnnnnnnnnnnnnnnnnnnnnnnnnnnnnnnnnnnnnnnnnnnnnnnnnnnnnnnnnnnnnnnnnnnnnnnnnnnnnnnnnnnnnnnnnnnnnnnnnnnnnnnnnnnnnnnnnnnnnnnnnnnnnnnnnnnnnnnnnnnnnnnnnnnnnnnnnnnnnnnnnnnnnnnnnnnnnnnnnnnnnnnnnnnnnnnnnnnnnnnnnnnnnnnnnnnnnnnnnnnnnnnnnnnnnnnnnnnnnnnnnnnnnnnnnnnnnnnnnnnnnnnnnnnnnnnnnnnnnnnnnnnnnnnnnnnnnnnnnnnnnnnnnnnnnnnnnnnnnnnnnnnnnnnnnnnnnnnnnnnnnnnnnnnnnnnnnnnnnnnnnnnnnnnnnnnnnnnnnnnnnnnnnnnnnnnnnnnnnnnnnnnnnnnnnnnnnnnnnnnnnnnnnnnnnnnnnnnnnnnnnnnnnnnnnnnnnnnnnnnnnnnnnnnnnnnnnnnnnnnnnnnnnnnnnnnnnnnnnnnnnnnnnnnnnnnnnnnnnnnnnnnnnnnnnnnnnnnnnnnnnnnnnnnnnnnnnnnnnnnnnnnnnnnnnnnnnnnnnnnnnnnnnnnnnnnnnnnnnnnnnnnnnnnnnnnnnnnnnnnnnnnnnnnnnnnnnnnnnnnnnnnnnnnnnnnnnnnnnnnnnnnnnnnnnnnnnnnnnnnnnnnnnnnnnnnnnnnnnnnnnnnnnnnnnnnnnnnnnnnnnnnnnnnnnnnnnnnnnnnnnnnnnnnnnnnnnnnnnnnnnnnnnnnnnnnnnnnnnnnnnnnnnnnnnnnnnnnnnnnnnnnnnnnnnnnnnnnnnnnnnnnnnnnnnnnnnnnnnnnnnnnnnnnnnnnnnnnnnnnnnnnnnnnnnnnnnnnnnnnnnnnnnnnnnnnnnnnnnnnnnnnnnnnnnnnnnnnnnnnnnnnnnnnnnnnnnnnnnnnnnnnnnnnnnnnnnnnnnnnnnnnnnnnnnnnnnnnnnnnnnnnnnnnnnnnnnnnnnnnnnnnnnnnnnnnnnnnnnnnnnnnnnnnnnnnnnnnnnnnnnnnnnnnnnnnnnnnnnnnnnnnnnnnnnnnnnnnnnnnnnnnnnnnnnnnnnnnnnnnnnnnnnnnnnnnnnnnnnnnnnnnnnnnnnnnnnnnnnnnnnnnnnnnnnnnnnnnnnnnnnnnnnnnnnnnnnnnnnnnnnnnnnnnnnnnnnnnnnnnnnnnnnnnnnnnnnnnnnnnnnnnnnnnnnnnnnnnnnnnnnnnnnnnnnnnnnnnnnnnnnnnnnnnnnnnnnnnnnnnnnnnnnnnnnnnnnnnnnnnnnnnnnnnnnnnnnnnnnnnnnnnnnnnnnnnnnnnnnnnnnnnnnnnnnnnnnnnnnnnnnnnnnnnnnnnnnnnnnnnnnnnnnnnnnnnnnnnnnnnnnnnnnnnnnnnnnnnnnnnnnnnnnnnnnnnnnnnnnnnnnnnnnnnnnnnnnnnnnnnnnnnnnnnnnnnnnnnnnnnnnnnnnnnnnnnnnnnnnnnnnnnnnnnnnnnnnnnnnnnnnnnnnnnnnnnnnnnnnnnnnnnnnnnnnnnnnnnnnnnnnnnnnnnnnnnnnnnnnnnnnnnnnnnnnnnnnnnnnnnnnnnnnnnnnnnnnnnnnnnnnnnnnnnnnnnnnnnnnnnnnnnnnnnnnnnnnnnnnnnnnnnnnnnnnnnnnnnnnnnnnnnnnnnnnnnnnnnnnnnnnnnnnnnnnnnnnnnnnnnnnnnnnnnnnnnnnnnnnnnnnnnnnnnnnnnnnnnnnnnnnnnnnnnnnnnnnnnnnnnnnnnnnnnnnnnnnnnnnnnnnnnnnnnnnnnnnnnnnnnnnnnnnnnnnnnnnnnnnnnnnnnnnnnnnnnnnnnnnnnnnnnnnnnnnnnnnnnnnnnnnnnnnnnnnnnnnnnnnnnnnnnnnnnnnnnnnnnnnnnnnnnnnnnnnnnnnnnnnnnnnnnnnnnnnnnnnnnnnnnnnnnnnnnnnnnnnnnnnnnnnnnnnnnnnnnnnnnnnnnnnnnnnnnnnnnnnnnnnnnnnnnnnnnnnnnnnnnnnnnnnnnnnnnnnnnnnnnnnnnnnnnnnnnnnnnnnnnnnnnnnnnnnnnnnnnnnnnnnnnnnnnnnnnnnnnnnnnnnnnnnnnnnnnnnnnnnnnnnnnnnnnnnnnnnnnnnnnnnnnnnnnnnnnnnnnnnnnnnnnnnnnnnnnnnnnnnnnnnnnnnnnnnnnnnnnnnnnnnnnnnnnnnnnnnnnnnnnnnnnnnnnnnnnnnnnnnnnnnnnnnnnnnnnnnnnnnnnnnnnnnnnnnnnnnnnnnnnnnnnnnnnnnnnnnnnnnnnnnnnnnnnnnnnnnnnnnnnnnnnnnnnnnnnnnnnnnnnnnnnnnnnnnnnnnnnnnnnnnnnnnnnnnnnnnnnnnnnnnnnnnnnnnnnnnnnnnnnnnnnnnnnnnnnnnnnnnnnnnnnnnnnnnnnnnnnnnnnnnnnnnnnnnnnnnnnnnnnnnnnnnnnnnnnnnnnnnnnnnnnnnnnnnnnnnnnnnnnnnnnnnnnnnnnnnnnnnnnnnnnnnnnnnnnnnnnnnnnnnnnnnnnnnnnnnnnnnnnnnnnnnnnnnnnnnnnnnnnnnnnnnnnnnnnnnnnnnnnnnnnnnnnnnnnnnnnnnnnnnnnnnnnnnnnnnnnnnnnnnnnnnnnnnnnnnnnnnnnnnnnnnnnnnnnnnnnnnnnnnnnnnnnnnnnnnnnnnnnnnnnnnnnnnnnnnnnnnnnnnnnnnnnnnnnnnnnnnnnnnnnnnnnnnnnnnnnnnnnnnnnnnnnnnnnnnnnnnnnnnnnnnnnnnnnnnnnnnnnnnnnnnnnnnnnnnnnnnnnnnnnnnnnnnnnnnnnnnnnnnnnnnnnnnnnnnnnnnnnnnnnnnnnnnnnnnnnnnnnnnnnnnnnnnnnnnnnnnnnnnnnnnnnnnnnnnnnnnnnnnnnnnnnnnnnnnnnnnnnnnnnnnnnnnnnnnnnnnnnnnnnnnnnnnnnnnnnnnnnnnnnnnnnnnnnnnnnnnnnnnnnnnnnnnnnnnnnnnnnnnnnnnnnnnnnnnnnnnnnnnnnnnnnnnnnnnnnnnnnnnnnnnnnnnnnnnnnnnnnnnnnnnnnnnnnnnnnnnnnnnnnnnnnnnnnnnnnnnnnnnnnnnnnnnnnnnnnnnnnnnnnnnnnnnnnnnnnnnnnnnnnnnnnnnnnnnnnnnnnnnnnnnnnnnnnnnnnnnnnnnnnnnnnnnnnnnnnnnnnnnnnnnnnnnnnnnnnnnnnnnnnnnnnnnnnnnnnnnnnnnnnnnnnnnnnnnnnnnnnnnnnnnnnnnnnnnnnnnnnnnnnnnnnnnnnnnnnnnnnnnnnnnnnnnnnnnnnnnnnnnnnnnnnnnnnnnnnnnnnnnnnnnnnnnnnnnnnnnnnnnnnnnnnnnnnnnnnnnnnnnnnnnnnnnnnnnnnnnnnnnnnnnnnnnnnnnnnnnnnnnnnnnnnnnnnnnnnnnnnnnnnnnnnnnnnnnnnnnnnnnnnnnnnnnnnnnnnnnnnnnnnnnnnnnnnnnnnnnnnnnnnnnnnnnnnnnnnnnnnnnnnnnnnnnnnnnnnnnnnnnnnnnnnnnnnnnnnnnnnnnnnnnnnnnnnnnnnnnnnnnnnnnnnnnnnnnnnnnnnnnnnnnnnnnnnnnnnnnnnnnnnnnnnnnnnnnnnnnnnnnnnnnnnnnnnnnnnnnnnnnnnnnnnnnnnnnnnnnnnnnnnnnnnnnnnnnnnnnnnnnnnnnnnnnnnnnnnnnnnnnnnnnnnnnnnnnnnnnnnnnnnnnnnnnnnnnnnnnnnnnnnnnnnnnnnnnnnnnnnnnnnnnnnnnnnnnnnnnnnnnnnnnnnnnnnnnnnnnnnnnnnnnnnnnnnnnnnnnnnnnnnnnnnnnnnnnnnnnnnnnnnnnnnnnnnnnnnnnnnnnnnnnnnnnnnnnnnnnnnnnnnnnnnnnnnnnnnnnnnnnnnnnnnnnnnnnnnnnnnnnnnnnnnnnnnnnnnnnnnnnnnnnnnnnnnnnnnnnnnnnnnnnnnnnnnnnnnnnnnnnnnnnnnnnnnnnnnnnnnnnnnnnnnnnnnnnnnnnnnnnnnnnnnnnnnnnnnnnnnnnnnnnnnnnnnnnnnnnnnnnnnnnnnnnnnnnnnnnnnnnnnnnnnnnnnnnnnnnnnnnnnnnnnnnnnnnnnnnnnnnnnnnnnnnnnnnnnnnnnnnnnnnnnnnnnnnnnnnnnnnnnnnnnnnnnnnnnnnnnnnnnnnnnnnnnnnnnnnnnnnnnnnnnnnnnnnnnnnnnnnnnnnnnnnnnnnnnnnnnnnnnnnnnnnnnnnnnnnnnnnnnnnnnnnnnnnnnnnnnnnnnnnnnnnnnnnnnnnnnnnnnnnnnnnnnnnnnnnnnnnnnnnnnnnnnnnnnnnnnnnnnnnnnnnnnnnnnnnnnnnnnnnnnnnnnnnnnnnnnnnnnnnnnnnnnnnnnnnnnnnnnnnnnnnnnnnnnnnnnnnnnnnnnnnnnnnnnnnnnnnnnnnnnnnnnnnnnnnnnnnnnnnnnnnnnnnnnnnnnnnnnnnnnnnnnnnnnnnnnnnnnnnnnnnnnnnnnnnnnnnnnnnnnnnnnnnnnnnnnnnnnnnnnnnnnnnnnnnnnnnnnnnnnnnnnnnnnnnnnnnnnnnnnnnnnnnnnnnnnnnnnnnnnnnnnnnnnnnnnnnnnnnnnnnnnnnnnnnnnnnnnnnnnnnnnnnnnnnnnnnnnnnnnnnnnnnnnnnnnnnnnnnnnnnnnnnnnnnnnnnnnnnnnnnnnnnnnnnnnnnnnnnnnnnnnnnnnnnnnnnnnnnnnnnnnnnnnnnnnnnnnnnnnnnnnnnnnnnnnnnnnnnnnnnnnnnnnnnnnnnnnnnnnnnnnnnnnnnnnnnnnnnnnnnnnnnnnnnnnnnnnnnnnnnnnnnnnnnnnnnnnnnnnnnnnnnnnnnnnnnnnnnnnnnnnnnnnnnnnnnnnnnnnnnnnnnnnnnnnnnnnnnnnnnnnnnnnnnnnnnnnnnnnnnnnnnnnnnnnnnnnnnnnnnnnnnnnnnnnnnnnnnnnnnnnnnnnnnnnnnnnnnnnnnnnnnnnnnnnnnnnnnnnnnnnnnnnnnnnnnnnnnnnnnnnnnnnnnnnnnnnnnnnnnnnnnnnnnnnnnnnnnnnnnnnnnnnnnnnnnnnnnnnnnnnnnnnnnnnnnnnnnnnnnnnnnnnnnnnnnnnnnnnnnnnnnnnnnnnnnnnnnnnnnnnnnnnnnnnnnnnnnnnnnnnnnnnnnnnnnnnnnnnnnnnnnnnnnnnnnnnnnnnnnnnnnnnnnnnnnnnnnnnnnnnnnnnnnnnnnnnnnnnnnnnnnnnnnnnnnnnnnnnnnnnnnnnnnnnnnnnnnnnnnnnnnnnnnnnnnnnnnnnnnnnnnnnnnnnnnnnnnnnnnnnnnnnnnnnnnnnnnnnnnnnnnnnnnnnnnnnnnnnnnnnnnnnnnnnnnnnnnnnnnnnnnnnnnnnnnnnnnnnnnnnnnnnnnnnnnnnnnnnnnnnnnnnnnnnnnnnnnnnnnnnnnnnnnnnnnnnnnnnnnnnnnnnnnnnnnnnnnnnnnnnnnnnnnnnnnnnnnnnnnnnnnnnnnnnnnnnnnnnnnnnnnnnnnnnnnnnnnnnnnnnnnnnnnnnnnnnnnnnnnnnnnnnnnnnnnnnnnnnnnnnnnnnnnnnnnnnnnnnnnnnnnnnnnnnnnnnnnnnnnnnnnnnnnnnnnnnnnnnnnnnnnnnnnnnnnnnnnnnnnnnnnnnnnnnnnnnnnnnnnnnnnnnnnnnnnnnnnnnnnnnnnnnnnnnnnnnnnnnnnnnnnnnnnnnnnnnnnnnnnnnnnnnnnnnnnnnnnnnnnnnnnnnnnnnnnnnnnnnnnnnnnnnnnnnnnnnnnnnnnnnnnnnnnnnnnnnnnnnnnnnnnnnnnnnnnnnnnnnnnnnnnnnnnnnnnnnnnnnnnnnnnnnnnnnnnnnnnnnnnnnnnnnnnnnnnnnnnnnnnnnnnnnnnnnnnnnnnnnnnnnnnnnnnnnnnnnnnnnnnnnnnnnnnnnnnnnnnnnnnnnnnnnnnnnnnnnnnnnnnnnnnnnnnnnnnnnnnnnnnnnnnnnnnnnnnnnnnnnnnnnnnnnnnnnnnnnnnnnnnnnnnnnnnnnnnnnnnnnnnnnnnnnnnnnnnnnnnnnnnnnnnnnnnnnnnnnnnnnnnnnnnnnnnnnnnnnnnnnnnnnnnnnnnnnnnnnnnnnnnnnnnnnnnnnnnnnnnnnnnnnnnnnnnnnnnnnnnnnnnnnnnnnnnnnnnnnnnnnnnnnnnnnnnnnnnnnnnnnnnnnnnnnnnnnnnnnnnnnnnnnnnnnnnnnnnnnnnnnnnnnnnnnnnnnnnnnnnnnnnnnnnnnnnnnnnnnnnnnnnnnnnnnnnnnnnnnnnnnnnnnnnnnnnnnnnnnnnnnnnnnnnnnnnnnnnnnnnnnnnnnnnnnnnnnnnnnnnnnnnnnnnnnnnnnnnnnnnnnnnnnnnnnnnnnnnnnnnnnnnnnnnnnnnnnnnnnnnnnnnnnnnnnnnnnnnnnnnnnnnnnnnnnnnnnnnnnnnnnnnnnnnnnnnnnnnnnnnnnnnnnnnnnnnnnnnnnnnnnnnnnnnnnnnnnnnnnnnnnnnnnnnnnnnnnnnnnnnnnnnnnnnnnnnnnnnnnnnnnnnnnnnnnnnnnnnnnnnnnnnnnnnnnnnnnnnnnnnnnnnnnnnnnnnnnnnnnnnnnnnnnnnnnnnnnnnnnnnnnnnnnnnnnnnnnnnnnnnnnnnnnnnnnnnnnnnnnnnnnnnnnnnnnnnnnnnnnnnnnnnnnnnnnnnnnnnnnnnnnnnnnnnnnnnnnnnnnnnnnnnnnnnnnnnnnnnnnnnnnnnnnnnnnnnnnnnnnnnnnnnnnnnnnnnnnnnnnnnnnnnnnnnnnnnnnnnnnnnnnnnnnnnnnnnnnnnnnnnnnnnnnnnnnnnnnnnnnnnnnnnnnnnnnnnnnnnnnnnnnnnnnnnnnnnnnnnnnnnnnnnnnnnnnnnnnnnnnnnnnnnnnnnnnnnnnnnnnnnnnnnnnnnnnnnnnnnnnnnnnnnnnnnnnnnnnnnnnnnnnnnnnnnnnnnnnnnnnnnnnnnnnnnnnnnnnnnnnnnnnnnnnnnnnnnnnnnnnnnnnnnnnnnnnnnnnnnnnnnnnnnnnnnnnnnnnnnnnnnnnnnnnnnnnnnnnnnnnnnnnnnnnnnnnnnnnnnnnnnnnnnnnnnnnnnnnnnnnnnnnnnnnnnnnnnnnnnnnnnnnnnnnnnnnnnnnnnnnnnnnnnnnnnnnnnnnnnnnnnnnnnnnnnnnnnnnnnnnnnnnnnnnnnnnnnnnnnnnnnnnnnnnnnnnnnnnnnnnnnnnnnnnnnnnnnnnnnnnnnnnnnnnnnnnnnnnnnnnnnnnnnnnnnnnnnnnnnnnnnnnnnnnnnnnnnnnnnnnnnnnnnnnnnnnnnnnnnnnnnnnnnnnnnnnnnnnnnnnnnnnnnnnnnnnnnnnnnnnnnnnnnnnnnnnnnnnnnnnnnnnnnnnnnnnnnnnnnnnnnnnnnnnnnnnnnnnnnnnnnnnnnnnnnnnnnnnnnnnnnnnnnnnnnnnnnnnnnnnnnnnnnnnnnnnnnnnnnnnnnnnnnnnnnnnnnnnnnnnnnnnnnnnnnnnnnnnnnnnnnnnnnnnnnnnnnnnnnnnnnnnnnnnnnnnnnnnnnnnnnnnnnnnnnnnnnnnnnnnnnnnnnnnnnnnnnnnnnnnnnnnnnnnnnnnnnnnnnnnnnnnnnnnnnnnnnnnnnnnnnnnnnnnnnnnnnnnnnnnnnnnnnnnnnnnnnnnnnnnnnnnnnnnnnnnnnnnnnnnnnnnnnnnnnnnnnnnnnnnnnnnnnnnnnnnnnnnnnnnnnnnnnnnnnnnnnnnnnnnnnnnnnnnnnnnnnnnnnnnnnnnnnnnnnnnnnnnnnnnnnnnnnnnnnnnnnnnnnnnnnnnnnnnnnnnnnnnnnnnnnnnnnnnnnnnnnnnnnnnnnnnnnnnnnnnnnnnnnnnnnnnnnnnnnnnnnnnnnnnnnnnnnnnnnnnnnnnnnnnnnnnnnnnnnnnnnnnnnnnnnnnnnnnnnnnnnnnnnnnnnnnnnnnnnnnnnnnnnnnnnnnnnnnnnnnnnnnnnnnnnnnnnnnnnnnnnnnnnnnnnnnnnnnnnnnnnnnnnnnnnnnnnnnnnnnnnnnnnnnnnnnnnnnnnnnnnnnnnnnnnnnnnnnnnnnnnnnnnnnnnnnnnnnnnnnnnnnnnnnnnnnnnnnnnnnnnnnnnnnnnnnnnnnnnnnnnnnnnnnnnnnnnnnnnnnnnnnnnnnnnnnnnnnnnnnnnnnnnnnnnnnnnnnnnnnnnnnnnnnnnnnnnnnnnnnnnnnnnnnnnnnnnnnnnnnnnnnnnnnnnnnnnnnnnnnnnnnnnnnnnnnnnnnnnnnnnnnnnnnnnnnnnnnnnnnnnnnnnnnnnnnnnnnnnnnnnnnnnnnnnnnnnnnnnnnnnnnnnnnnnnnnnnnnnnnnnnnnnnnnnnnnnnnnnnnnnnnnnnnnnnnnnnnnnnnnnnnnnnnnnnnnnnnnnnnnnnnnnnnnnnnnnnnnnnnnnnnnnnnnnnnnnnnnnnnnnnnnnnnnnnnnnnnnnnnnnnnnnnnnnnnnnnnnnnnnnnnnnnnnnnnnnnnnnnnnnnnnnnnnnnnnnnnnnnnnnnnnnnnnnnnnnnnnnnnnnnnnnnnnnnnnnnnnnnnnnnnnnnnnnnnnnnnnnnnnnnnnnnnnnnnnnnnnnnnnnnnnnnnnnnnnnnnnnnnnnnnnnnnnnnnnnnnnnnnnnnnnnnnnnnnnnnnnnnnnnnnnnnnnnnnnnnnnnnnnnnnnnnnnnnnnnnnnnnnnnnnnnnnnnnnnnnnnnnnnnnnnnnnnnnnnnnnnnnnnnnnnnnnnnnnnnnnnnnnnnnnnnnnnnnnnnnnnnnnnnnnnnnnnnnnnnnnnnnnnnnnnnnnnnnnnnnnnnnnnnnnnnnnnnnnnnnnnnnnnnnnnnnnnnnnnnnnnnnnnnnnnnnnnnnnnnnnnnnnnnnnnnnnnnnnnnnnnnnnnnnnnnnnnnnnnnnnnnnnnnnnnnnnnnnnnnnnnnnnnnnnnnnnnnnnnnnnnnnnnnnnnnnnnnnnnnnnnnnnnnnnnnnnnnnnnnnnnnnnnnnnnnnnnnnnnnnnnnnnnnnnnnnnnnnnnnnnnnnnnnnnnnnnnnnnnnnnnnnnnnnnnnnnnnnnnnnnnnnnnnnnnnnnnnnnnnnnnnnnnnnnnnnnnnnnnnnnnnnnnnnnnnnnnnnnnnnnnnnnnnnnnnnnnnnnnnnnnnnnnnnnnnnnnnnnnnnnnnnnnnnnnnnnnnnnnnnnnnnnnnnnnnnnnnnnnnnnnnnnnnnnnnnnnnnnnnnnnnnnnnnnnnnnnnnnnnnnnnnnnnnnnnnnnnnnnnnnnnnnnnnnnnnnnnnnnnnnnnnnnnnnnnnnnnnnnnnnnnnnnnnnnnnnnnnnnnnnnnnnnnnnnnnnnnnnnnnnnnnnnnnnnnnnnnnnnnnnnnnnnnnnnnnnnnnnnnnnnnnnnnnnnnnnnnnnnnnnnnnnnnnnnnnnnnnnnnnnnnnnnnnnnnnnnnnnnnnnnnnnnnnnnnnnnnnnnnnnnnnnnnnnnnnnnnnnnnnnnnnnnnnnnnnnnnnnnnnnnnnnnnnnnnnnnnnnnnnnnnnnnnnnnnnnnnnnnnnnnnnnnnnnnnnnnnnnnnnnnnnnnnnnnnnnnnnnnnnnnnnnnnnnnnnnnnnnnnnnnnnnnnnnnnnnnnnnnnnnnnnnnnnnnnnnnnnnnnnnnnnnnnnnnnnnnnnnnnnnnnnnnnnnnnnnnnnnnnnnnnnnnnnnnnnnnnnnnnnnnnnnnnnnnnnnnnnnnnnnnnnnnnnnnnnnnnnnnnnnnnnnnnnnnnnnnnnnnnnnnnnnnnnnnnnnnnnnnnnnnnnnnnnnnnnnnnnnnnnnnnnnnnnnnnnnnnnnnnnnnnnnnnnnnnnnnnnnnnnnnnnnnnnnnnnnnnnnnnnnnnnnnnnnnnnnnnnnnnnnnnnnnnnnnnnnnnnnnnnnnnnnnnnnnnnnnnnnnnnnnnnnnnnnnnnnnnnnnnnnnnnnnnnnnnnnnnnnnnnnnnnnnnnnnnnnnnnnnnnnnnnnnnnnnnnnnnnnnnnnnnnnnnnnnnnnnnnnnnnnnnnnnnnnnnnnnnnnnnnnnnnnnnnnnnnnnnnnnnnnnnnnnnnnnnnnnnnnnnnnnnnnnnnnnnnnnnnnnnnnnnnnnnnnnnnnnnnnnnnnnnnnnnnnnnnnnnnnnnnnnnnnnnnnnnnnnnnnnnnnnnnnnnnnnnnnnnnnnnnnnnnnnnnnnnnnnnnnnnnnnnnnnnnnnnnnnnnnnnnnnnnnnnnnnnnnnnnnnnnnnnnnnnnnnnnnnnnnnnnnnnnnnnnnnnnnnnnnnnnnnnnnnnnnnnnnnnnnnnnnnnnnnnnnnnnnnnnnnnnnnnnnnnnnnnnnnnnnnnnnnnnnnnnnnnnnnnnnnnnnnnnnnnnnnnnnnnnnnnnnnnnnnnnnnnnnnnnnnnnnnnnnnnnnnnnnnnnnnnnnnnnnnnnnnnnnnnnnnnnnnnnnnnnnnnnnnnnnnnnnnnnnnnnnnnnnnnnnnnnnnnnnnnnnnnnnnnnnnnnnnnnnnnnnnnnnnnnnnnnnnnnnnnnnnnnnnnnnnnnnnnnnnnnnnnnnnnnnnnnnnnnnnnnnnnnnnnnnnnnnnnnnnnnnnnnnnnnnnnnnnnnnnnnnnnnnnnnnnnnnnnnnnnnnnnnnnnnnnnnnnnnnnnnnnnnnnnnnnnnnnnnnnnnnnnnnnnnnnnnnnnnnnnnnnnnnnnnnnnnnnnnnnnnnnnnnnnnnnnnnnnnnnnnnnnnnnnnnnnnnnnnnnnnnnnnnnnnnnnnnnnnnnnnnnnnnnnnnnnnnnnnnnnnnnnnnnnnnnnnnnnnnnnnnnnnnnnnnnnnnnnnnnnnnnnnnnnnnnnnnnnnnnnnnnnnnnnnnnnnnnnnnnnnnnnnnnnnnnnnnnnnnnnnnnnnnnnnnnnnnnnnnnnnnnnnnnnnnnnnnnnnnnnnnnnnnnnnnnnnnnnnnnnnnnnnnnnnnnnnnnnnnnnnnnnnnnnnnnnnnnnnnnnnnnnnnnnnnnnnnnnnnnnnnnnnnnnnnnnnnnnnnnnnnnnnnnnnnnnnnnnnnnnnnnnnnnnnnnnnnnnnnnnnnnnnnnnnnnnnnnnnnnnnnnnnnnnnnnnnnnnnnnnnnnnnnnnnnnnnnnnnnnnnnnnnnnnnnnnnnnnnnnnnnnnnnnnnnnnnnnnnnnnnnnnnnnnnnnnnnnnnnnnnnnnnnnnnnnnnnnnnnnnnnnnnnnnnnnnnnnnnnnnnnnnnnnnnnnnnnnnnnnnnnnnnnnnnnnnnnnnnnnnnnnnnnnnnnnnnnnnnnnnnnnnnnnnnnnnnnnnnnnnnnnnnnnnnnnnnnnnnnnnnnnnnnnnnnnnnnnnnnnnnnnnnnnnnnnnnnnnnnnnnnnnnnnnnnnnnnnnnnnnnnnnnnnnnnnnnnnnnnnnnnnnnnnnnnnnnnnnnnnnnnnnnnnnnnnnnnnnnnnnnnnnnnnnnnnnnnnnnnnnnnnnnnnnnnnnnnnnnnnnnnnnnnnnnnnnnnnnnnnnnnnnnnnnnnnnnnnnnnnnnnnnnnnnnnnnnnnnnnnnnnnnnnnnnnnnnnnnnnnnnnnnnnnnnnnnnnnnnnnnnnnnnnnnnnnnnnnnnnnnnnnnnnnnnnnnnnnnnnnnnnnnnnnnnnnnnnnnnnnnnnnnnnnnnnnnnnnnnnnnnnnnnnnnnnnnnnnnnnnnnnnnnnnnnnnnnnnnnnnnnnnnnnnnnnnnnnnnnnnnnnnnnnnnnnnnnnnnnnnnnnnnnnnnnnnnnnnnnnnnnnnnnnnnnnnnnnnnnnnnnnnnnnnnnnnnnnnnnnnnnnnnnnnnnnnnnnnnnnnnnnnnnnnnnnnnnnnnnnnnnnnnnnnnnnnnnnnnnnnnnnnnnnnnnnnnnnnnnnnnnnnnnnnnnnnnnnnnnnnnnnnnnnnnnnnnnnnnnnnnnnnnnnnnnnnnnnnnnnnnnnnnnnnnnnnnnnnnnnnnnnnnnnnnnnnnnnnnnnnnnnnnnnnnnnnnnnnnnnnnnnnnnnnnnnnnnnnnnnnnnnnnnnnnnnnnnnnnnnnnnnnnnnnnnnnnnnnnnnnnnnnnnnnnnnnnnnnnnnnnnnnnnnnnnnnnnnnnnnnnnnnnnnnnnnnnnnnnnnnnnnnnnnnnnnnnnnnnnnnnnnnnnnnnnnnnnnnnnnnnnnnnnnnnnnnnnnnnnnnnnnnnnnnnnnnnnnnnnnnnnnnnnnnnnnnnnnnnnnnnnnnnnnnnnnnnnnnnnnnnnnnnnnnnnnnnnnnnnnnnnnnnnnnnnnnnnnnnnnnnnnnnnnnnnnnnnnnnnnnnnnnnnnnnnnnnnnnnnnnnnnnnnnnnnnnnnnnnnnnnnnnnnnnnnnnnnnnnnnnnnnnnnnnnnnnnnnnnnnnnnnnnnnnnnnnnnnnnnnnnnnnnnnnnnnnnnnnnnnnnnnnnnnnnnnnnnnnnnnnnnnnnnnnnnnnnnnnnnnnnnnnnnnnnnnnnnnnnnnnnnnnnnnnnnnnnnnnnnnnnnnnnnnnnnnnnnnnnnnnnnnnnnnnnnnnnnnnnnnnnnnnnnnnnnnnnnnnnnnnnnnnnnnnnnnnnnnnnnnnnnnnnnnnnnnnnnnnnnnnnnnnnnnnnnnnnnnnnnnnnnnnnnnnnnnnnnnnnnnnnnnnnnnnnnnnnnnnnnnnnnnnnnnnnnnnnnnnnnnnnnnnnnnnnnnnnnnnnnnnnnnnnnnnnnnnnnnnnnnnnnnnnnnnnnnnnnnnnnnnnnnnnnnnnnnnnnnnnnnnnnnnnnnnnnnnnnnnnnnnnnnnnnnnnnnnnnnnnnnnnnnnnnnnnnnnnnnnnnnnnnnnnnnnnnnnnnnnnnnnnnnnnnnnnnnnnnnnnnnnnnnnnnnnnnnnnnnnnnnnnnnnnnnnnnnnnnnnnnnnnnnnnnnnnnnnnnnnnnnnnnnnnnnnnnnnnnnnnnnnnnnnnnnnnnnnnnnnnnnnnnnnnnnnnnnnnnnnnnnnnnnnnnnnnnnnnnnnnnnnnnnnnnnnnnnnnnnnnnnnnnnnnnnnnnnnnnnnnnnnnnnnnnnnnnnnnnnnnnnnnnnnnnnnnnnnnnnnnnnnnnnnnnnnnnnnnnnnnnnnnnnnnnnnnnnnnnnnnnnnnnnnnnnnnnnnnnnnnnnnnnnnnnnnnnnnnnnnnnnnnnnnnnnnnnnnnnnnnnnnnnnnnnnnnnnnnnnnnnnnnnnnnnnnnnnnnnnnnnnnnnnnnnnnnnnnnnnnnnnnnnnnnnnnnnnnnnnnnnnnnnnnnnnnnnnnnnnnnnnnnnnnnnnnnnnnnnnnnnnnnnnnnnnnnnnnnnnnnnnnnnnnnnnnnnnnnnnnnnnnnnnnnnnnnnnnnnnnnnnnnnnnnnnnnnnnnnnnnnnnnnnnnnnnnnnnnnnnnnnnnnnnnnnnnnnnnnnnnnnnnnnnnnnnnnnnnnnnnnnnnnnnnnnnnnnnnnnnnnnnnnnnnnnnnnnnnnnnnnnnnnnnnnnnnnnnnnnnnnnnnnnnnnnnnnnnnnnnnnnnnnnnnnnnnnnnnnnnnnnnnnnnnnnnnnnnnnnnnnnnnnnnnnnnnnnnnnnnnnnnnnnnnnnnnnnnnnnnnnnnnnnnnnnnnnnnnnnnnnnnnnnnnnnnnnnnnnnnnnnnnnnnnnnnnnnnnnnnnnnnnnnnnnnnnnnnnnnnnnnnnnnnnnnnnnnnnnnnnnnnnnnnnnnnnnnnnnnnnnnnnnnnnnnnnnnnnnnnnnnnnnnnnnnnnnnnnnnnnnnnnnnnnnnnnnnnnnnnnnnnnnnnnnnnnnnnnnnnnnnnnnnnnnnnnnnnnnnnnnnnnnnnnnnnnnnnnnnnnnnnnnnnnnnnnnnnnnnnnnnnnnnnnnnnnnnnnnnnnnnnnnnnnnnnnnnnnnnnnnnnnnnnnnnnnnnnnnnnnnnnnnnnnnnnnnnnnnnnnnnnnnnnnnnnnnnnnnnnnnnnnnnnnnnnnnnnnnnnnnnnnnnnnnnnnnnnnnnnnnnnnnnnnnnnnnnnnnnnnnnnnnnnnnnnnnnnnnnnnnnnnnnnnnnnnnnnnnnnnnnnnnnnnnnnnnnnnnnnnnnnnnnnnnnnnnnnnnnnnnnnnnnnnnnnnnnnnnnnnnnnnnnnnnnnnnnnnnnnnnnnnnnnnnnnnnnnnnnnnnnnnnnnnnnnnnnnnnnnnnnnnnnnnnnnnnnnnnnnnnnnnnnnnnnnnnnnnnnnnnnnnnnnnnnnnnnnnnnnnnnnnnnnnnnnnnnnnnnnnnnnnnnnnnnnnnnnnnnnnnnnnnnnnnnnnnnnnnnnnnnnnnnnnnnnnnnnnnnnnnnnnnnnnnnnnnnnnnnnnnnnnnnnnnnnnnnnnnnnnnnnnnnnnnnnnnnnnnnnnnnnnnnnnnnnnnnnnnnnnnnnnnnnnnnnnnnnnnnnnnnnnnnnnnnnnnnnnnnnnnnnnnnnnnnnnnnnnnnnnnnnnnnnnnnnnnnnnnnnnnnnnnnnnnnnnnnnnnnnnnnnnnnnnnnnnnnnnnnnnnnnnnnnnnnnnnnnnnnnnnnnnnnnnnnnnnnnnnnnnnnnnnnnnnnnnnnnnnnnnnnnnnnnnnnnnnnnnnnnnnnnnnnnnnnnnnnnnnnnnnnnnnnnnnnnnnnnnnnnnnnnnnnnnnnnnnnnnnnnnnnnnnnnnnnnnnnnnnnnnnnnnnnnnnnnnnnnnnnnnnnnnnnnnnnnnnnnnnnnnnnnnnnnnnnnnnnnnnnnnnnnnnnnnnnnnnnnnnnnnnnnnnnnnnnnnnnnnnnnnnnnnnnnnnnnnnnnnnnnnnnnnnnnnnnnnnnnnnnnnnnnnnnnnnnnnnnnnnnnnnnnnnnnnnnnnnnnnnnnnnnnnnnnnnnnnnnnnnnnnnnnnnnnnnnnnnnnnnnnnnnnnnnnnnnnnnnnnnnnnnnnnnnnnnnnnnnnnnnnnnnnnnnnnnnnnnnnnnnnnnnnnnnnnnnnnnnnnnnnnnnnnnnnnnnnnnnnnnnnnnnnnnnnnnnnnnnnnnnnnnnnnnnnnnnnnnnnnnnnnnnnnnnnnnnnnnnnnnnnnnnnnnnnnnnnnnnnnnnnnnnnnnnnnnnnnnnnnnnnnnnnnnnnnnnnnnnnnnnnnnnnnnnnnnnnnnnnnnnnnnnnnnnnnnnnnnnnnnnnnnnnnnnnnnnnnnnnnnnnnnnnnnnnnnnnnnnnnnnnnnnnnnnnnnnnnnnnnnnnnnnnnnnnnnnnnnnnnnnnnnnnnnnnnnnnnnnnnnnnnnnnnnnnnnnnnnnnnnnnnnnnnnnnnnnnnnnnnnnnnnnnnnnnnnnnnnnnnnnnnnnnnnnnnnnnnnnnnnnnnnnnnnnnnnnnnnnnnnnnnnnnnnnnnnnnnnnnnnnnnnnnnnnnnnnnnnnnnnnnnnnnnnnnnnnnnnnnnnnnnnnnnnnnnnnnnnnnnnnnnnnnnnnnnnnnnnnnnnnnnnnnnnnnnnnnnnnnnnnnnnnnnnnnnnnnnnnnnnnnnnnnnnnnnnnnnnnnnnnnnnnnnnnnnnnnnnnnnnnnnnnnnnnnnnnnnnnnnnnnnnnnnnnnnnnnnnnnnnnnnnnnnnnnnnnnnnnnnnnnnnnnnnnnnnnnnnnnnnnnnnnnnnnnnnnnnnnnnnnnnnnnnnnnnnnnnnnnnnnnnnnnnnnnnnnnnnnnnnnnnnnnnnnnnnnnnnnnnnnnnnnnnnnnnnnnnnnnnnnnnnnnnnnnnnnnnnnnnnnnnnnnnnnnnnnnnnnnnnnnnnnnnnnnnnnnnnnnnnnnnnnnnnnnnnnnnnnnnnnnnnnnnnnnnnnnnnnnnnnnnnnnnnnnnnnnnnnnnnnnnnnnnnnnnnnnnnnnnnnnnnnnnnnnnnnnnnnnnnnnnnnnnnnnnnnnnnnnnnnnnnnnnnnnnnnnnnnnnnnnnnnnnnnnnnnnnnnnnnnnnnnnnnnnnnnnnnnnnnnnnnnnnnnnnnnnnnnnnnnnnnnnnnnnnnnnnnnnnnnnnnnnnnnnnnnnnnnnnnnnnnnnnnnnnnnnnnnnnnnnnnnnnnnnnnnnnnnnnnnnnnnnnnnnnnnnnnnnnnnnnnnnnnnnnnnnnnnnnnnnnnnnnnnnnnnnnnnnnnnnnnnnnnnnnnnnnnnnnnnnnnnnnnnnnnnnnnnnnnnnnnnnnnnnnnnnnnnnnnnnnnnnnnnnnnnnnnnnnnnnnnnnnnnnnnnnnnnnnnnnnnnnnnnnnnnnnnnnnnnnnnnnnnnnnnnnnnnnnnnnnnnnnnnnnnnnnnnnnnnnnnnnnnnnnnnnnnnnnnnnnnnnnnnnnnnnnnnnnnnnnnnnnnnnnnnnnnnnnnnnnnnnnnnnnnnnnnnnnnnnnnnnnnnnnnnnnnnnnnnnnnnnnnnnnnnnnnnnnnnnnnnnnnnnnnnnnnnnnnnnnnnnnnnnnnnnnnnnnnnnnnnnnnnnnnnnnnnnnnnnnnnnnnnnnnnnnnnnnnnnnnnnnnnnnnnnnnnnnnnnnnnnnnnnnnnnnnnnnnnnnnnnnnnnnnnnnnnnnnnnnnnnnnnnnnnnnnnnnnnnnnnnnnnnnnnnnnnnnnnnnnnnnnnnnnnnnnnnnnnnnnnnnnnnnnnnnnnnnnnnnnnnnnnnnnnnnnnnnnnnnnnnnnnnnnnnnnnnnnnnnnnnnnnnnnnnnnnnnnnnnnnnnnnnnnnnnnnnnnnnnnnnnnnnnnnnnnnnnnnnnnnnnnnnnnnnnnnnnnnnnnnnnnnnnnnnnnnnnnnnnnnnnnnnnnnnnnnnnnnnnnnnnnnnnnnnnnnnnnnnnnnnnnnnnnnnnnnnnnnnnnnnnnnnnnnnnnnnnnnnnnnnnnnnnnnnnnnnnnnnnnnnnnnnnnnnnnnnnnnnnnnnnnnnnnnnnnnnnnnnnnnnnnnnnnnnnnnnnnnnnnnnnnnnnnnnnnnnnnnnnnnnnnnnnnnnnnnnnnnnnnnnnnnnnnnnnnnnnnnnnnnnnnnnnnnnnnnnnnnnnnnnnnnnnnnnnnnnnnnnnnnnnnnnnnnnnnnnnnnnnnnnnnnnnnnnnnnnnnnnnnnnnnnnnnnnnnnnnnnnnnnnnnnnnnnnnnnnnnnnnnnnnnnnnnnnnnnnnnnnnnnnnnnnnnnnnnnnnnnnnnnnnnnnnnnnnnnnnnnnnnnnnnnnnnnnnnnnnnnnnnnnnnnnnnnnnnnnnnnnnnnnnnnnnnnnnnnnnnnnnnnnnnnnnnnnnnnnnnnnnnnnnnnnnnnnnnnnnnnnnnnnnnnnnnnnnnnnnnnnnnnnnnnnnnnnnnnnnnnnnnnnnnnnnnnnnnnnnnnnnnnnnnnnnnnnnnnnnnnnnnnnnnnnnnnnnnnnnnnnnnnnnnnnnnnnnnnnnnnnnnnnnnnnnnnnnnnnnnnnnnnnnnnnnnnnnnnnnnnnnnnnnnnnnnnnnnnnnnnnnnnnnnnnnnnnnnnnnnnnnnnnnnnnnnnnnnnnnnnnnnnnnnnnnnnnnnnnnnnnnnnnnnnnnnnnnnnnnnnnnnnnnnnnnnnnnnnnnnnnnnnnnnnnnnnnnnnnnnnnnnnnnnnnnnnnnnnnnnnnnnnnnnnnnnnnnnnnnnnnnnnnnnnnnnnnnnnnnnnnnnnnnnnnnnnnnnnnnnnnnnnnnnnnnnnnnnnnnnnnnnnnnnnnnnnnnnnnnnnnnnnnnnnnnnnnnnnnnnnnnnnnnnnnnnnnnnnnnnnnnnnnnnnnnnnnnnnnnnnnnnnnnnnnnnnnnnnnnnnnnnnnnnnnnnnnnnnnnnnnnnnnnnnnnnnnnnnnnnnnnnnnnnnnnnnnnnnnnnnnnnnnnnnnnnnnnnnnnnnnnnnnnnnnnnnnnnnnnnnnnnnnnnnnnnnnnnnnnnnnnnnnnnnnnnnnnnnnnnnnnnnnnnnnnnnnnnnnnnnnnnnnnnnnnnnnnnnnnnnnnnnnnnnnnnnnnnnnnnnnnnnnnnnnnnnnnnnnnnnnnnnnnnnnnnnnnnnnnnnnnnnnnnnnnnnnnnnnnnnnnnnnnnnnnnnnnnnnnnnnnnnnnnnnnnnnnnnnnnnnnnnnnnnnnnnnnnnnnnnnnnnnnnnnnnnnnnnnnnnnnnnnnnnnnnnnnnnnnnnnnnnnnnnnnnnnnnnnnnnnnnnnnnnnnnnnnnnnnnnnnnnnnnnnnnnnnnnnnnnnnnnnnnnnnnnnnnnnnnnnnnnnnnnnnnnnnnnnnnnnnnnnnnnnnnnnnnnnnnnnnnnnnnnnnnnnnnnnnnnnnnnnnnnnnnnnnnnnnnnnnnnnnnnnnnnnnnnnnnnnnnnnnnnnnnnnnnnnnnnnnnnnnnnnnnnnnnnnnnnnnnnnnnnnnnnnnnnnnnnnnnnnnnnnnnnnnnnnnnnnnnnnnnnnnnnnnnnnnnnnnnnnnnnnnnnnnnnnnnnnnnnnnnnnnnnnnnnnnnnnnnnnnnnnnnnnnnnnnnnnnnnnnnnnnnnnnnnnnnnnnnnnnnnnnnnnnnnnnnnnnnnnnnnnnnnnnnnnnnnnnnnnnnnnnnnnnnnnnnnnnnnnnnnnnnnnnnnnnnnnnnnnnnnnnnnnnnnnnnnnnnnnnnnnnnnnnnnnnnnnnnnnnnnnnnnnnnnnnnnnnnnnnnnnnnnnnnnnnnnnnnnnnnnnnnnnnnnnnnnnnnnnnnnnnnnnnnnnnnnnnnnnnnnnnnnnnnnnnnnnnnnnnnnnnnnnnnnnnnnnnnnnnnnnnnnnnnnnnnnnnnnnnnnnnnnnnnnnnnnnnnnnnnnnnnnnnnnnnnnnnnnnnnnnnnnnnnnnnnnnnnnnnnnnnnnnnnnnnnnnnnnnnnnnnnnnnnnnnnnnnnnnnnnnnnnnnnnnnnnnnnnnnnnnnnnnnnnnnnnnnnnnnnnnnnnnnnnnnnnnnnnnnnnnnnnnnnnnnnnnnnnnnnnnnnnnnnnnnnnnnnnnnnnnnnnnnnnnnnnnnnnnnnnnnnnnnnnnnnnnnnnnnnnnnnnnnnnnnnnnnnnnnnnnnnnnnnnnnnnnnnnnnnnnnnnnnnnnnnnnnnnnnnnnnnnnnnnnnnnnnnnnnnnnnnnnnnnnnnnnnnnnnnnnnnnnnnnnnnnnnnnnnnnnnnnnnnnnnnnnnnnnnnnnnnnnnnnnnnnnnnnnnnnnnnnnnnnnnnnnnnnnnnnnnnnnnnnnnnnnnnnnnnnnnnnnnnnnnnnnnnnnnnnnnnnnnnnnnnnnnnnnnnnnnnnnnnnnnnnnnnnnnnnnnnnnnnnnnnnnnnnnnnnnnnnnnnnnnnnnnnnnnnnnnnnnnnnnnnnnnnnnnnnnnnnnnnnnnnnnnnnnnnnnnnnnnnnnnnnnnnnnnnnnnnnnnnnnnnnnnnnnnnnnnnnnnnnnnnnnnnnnnnnnnnnnnnnnnnnnnnnnnnnnnnnnnnnnnnnnnnnnnnnnnnnnnnnnnnnnnnnnnnnnnnnnnnnnnnnnnnnnnnnnnnnnnnnnnnnnnnnnnnnnnnnnnnnnnnnnnnnnnnnnnnnnnnnnnnnnnnnnnnnnnnnnnnnnnnnnnnnnnnnnnnnnnnnnnnnnnnnnnnnnnnnnnnnnnnnnnnnnnnnnnnnnnnnnnnnnnnnnnnnnnnnnnnnnnnnnnnnnnnnnnnnnnnnnnnnnnnnnnnnnnnnnnnnnnnnnnnnnnnnnnnnnnnnnnnnnnnnnnnnnnnnnnnnnnnnnnnnnnnnnnnnnnnnnnnnnnnnnnnnnnnnnnnnnnnnnnnnnnnnnnnnnnnnnnnnnnnnnnnnnnnnnnnnnnnnnnnnnnnnnnnnnnnnnnnnnnnnnnnnnnnnnnnnnnnnnnnnnnnnnnnnnnnnnnnnnnnnnnnnnnnnnnnnnnnnnnnnnnnnnnnnnnnnnnnnnnnnnnnnnnnnnnnnnnnnnnnnnnnnnnnnnnnnnnnnnnnnnnnnnnnnnnnnnnnnnnnnnnnnnnnnnnnnnnnnnnnnnnnnnnnnnnnnnnnnnnnnnnnnnnnnnnnnnnnnnnnnnnnnnnnnnnnnnnnnnnnnnnnnnnnnnnnnnnnnnnnnnnnnnnnnnnnnnnnnnnnnnnnnnnnnnnnnnnnnnnnnnnnnnnnnnnnnnnnnnnnnnnnnnnnnnnnnnnnnnnnnnnnnnnnnnnnnnnnnnnnnnnnnnnnnnnnnnnnnnnnnnnnnnnnnnnnnnnnnnnnnnnnnnnnnnnnnnnnnnnnnnnnnnnnnnnnnnnnnnnnnnnnnnnnnnnnnnnnnnnnnnnnnnnnnnnnnnnnnnnnnnnnnnnnnnnnnnnnnnnnnnnnnnnnnnnnnnnnnnnnnnnnnnnnnnnnnnnnnnnnnnnnnnnnnnnnnnnnnnnnnnnnnnnnnnnnnnnnnnnnnnnnnnnnnnnnnnnnnnnnnnnnnnnnnnnnnnnnnnnnnnnnnnnnnnnnnnnnnnnnnnnnnnnnnnnnnnnnnnnnnnnnnnnnnnnnnnnnnnnnnnnnnnnnnnnnnnnnnnnnnnnnnnnnnnnnnnnnnnnnnnnnnnnnnnnnnnnnnnnnnnnnnnnnnnnnnnnnnnnnnnnnnnnnnnnnnnnnnnnnnnnnnnnnnnnnnnnnnnnnnnnnnnnnnnnnnnnnnnnnnnnnnnnnnnnnnnnnnnnnnnnnnnnnnnnnnnnnnnnnnnnnnnnnnnnnnnnnnnnnnnnnnnnnnnnnnnnnnnnnnnnnnnnnnnnnnnnnnnnnnnnnnnnnnnnnnnnnnnnnnnnnnnnnnnnnnnnnnnnnnnnnnnnnnnnnnnnnnnnnnnnnnnnnnnnnnnnnnnnnnnnnnnnnnnnnnnnnnnnnnnnnnnnnnnnnnnnnnnnnnnnnnnnnnnnnnnnnnnnnnnnnnnnnnnnnnnnnnnnnnnnnnnnnnnnnnnnnnnnnnnnnnnnnnnnnnnnnnnnnnnnnnnnnnnnnnnnnnnnnnnnnnnnnnnnnnnnnnnnnnnnnnnnnnnnnnnnnnnnnnnnnnnnnnnnnnnnnnnnnnnnnnnnnnnnnnnnnnnnnnnnnnnnnnnnnnnnnnnnnnnnnnnnnnnnnnnnnnnnnnnnnnnnnnnnnnnnnnnnnnnnnnnnnnnnnnnnnnnnnnnnnnnnnnnnnnnnnnnnnnnnnnnnnnnnnnnnnnnnnnnnnnnnnnnnnnnnnnnnnnnnnnnnnnnnnnnnnnnnnnnnnnnnnnnnnnnnnnnnnnnnnnnnnnnnnnnnnnnnnnnnnnnnnnnnnnnnnnnnnnnnnnnnnnnnnnnnnnnnnnnnnnnnnnnnnnnnnnnnnnnnnnnnnnnnnnnnnnnnnnnnnnnnnnnnnnnnnnnnnnnnnnnnnnnnnnnnnnnnnnnnnnnnnnnnnnnnnnnnnnnnnnnnnnnnnnnnnnnnnnnnnnnnnnnnnnnnnnnnnnnnnnnnnnnnnnnnnnnnnnnnnnnnnnnnnnnnnnnnnnnnnnnnnnnnnnnnnnnnnnnnnnnnnnnnnnnnnnnnnnnnnnnnnnnnnnnnnnnnnnnnnnnnnnnnnnnnnnnnnnnnnnnnnnnnnnnnnnnnnnnnnnnnnnnnnnnnnnnnnnnnnnnnnnnnnnnnnnnnnnnnnnnnnnnnnnnnnnnnnnnnnnnnnnnnnnnnnnnnnnnnnnnnnnnnnnnnnnnnnnnnnnnnnnnnnnnnnnnnnnnnnnnnnnnnnnnnnnnnnnnnnnnnnnnnnnnnnnnnnnnnnnnnnnnnnnnnnnnnnnnnnnnnnnnnnnnnnnnnnnnnnnnnnnnnnnnnnnnnnnnnnnnnnnnnnnnnnnnnnnnnnnnnnnnnnnnnnnnnnnnnnnnnnnnnnnnnnnnnnnnnnnnnnnnnnnnnnnnnnnnnnnnnnnnnnnnnnnnnnnnnnnnnnnnnnnnnnnnnnnnnnnnnnnnnnnnnnnnnnnnnnnnnnnnnnnnnnnnnnnnnnnnnnnnnnnnnnnnnnnnnnnnnnnnnnnnnnnnnnnnnnnnnnnnnnnnnnnnnnnnnnnnnnnnnnnnnnnnnnnnnnnnnnnnnnnnnnnnnnnnnnnnnnnnnnnnnnnnnnnnnnnnnnnnnnnnnnnnnnnnnnnnnnnnnnnnnnnnnnnnnnnnnnnnnnnnnnnnnnnnnnnnnnnnnnnnnnnnnnnnnnnnnnnnnnnnnnnnnnnnnnnnnnnnnnnnnnnnnnnnnnnnnnnnnnnnnnnnnnnnnnnnnnnnnnnnnnnnnnnnnnnnnnnnnnnnnnnnnnnnnnnnnnnnnnnnnnnnnnnnnnnnnnnnnnnnnnnnnnnnnnnnnnnnnnnnnnnnnnnnnnnnnnnnnnnnnnnnnnnnnnnnnnnnnnnnnnnnnnnnnnnnnnnnnnnnnnnnnnnnnnnnnnnnnnnnnnnnnnnnnnnnnnnnnnnnnnnnnnnnnnnnnnnnnnnnnnnnnnnnnnnnnnnnnnnnnnnnnnnnnnnnnnnnnnnnnnnnnnnnnnnnnnnnnnnnnnnnnnnnnnnnnnnnnnnnnnnnnnnnnnnnnnnnnnnnnnnnnnnnnnnnnnnnnnnnnnnnnnnnnnnnnnnnnnnnnnnnnnnnnnnnnnnnnnnnnnnnnnnnnnnnnnnnnnnnnnnnnnnnnnnnnnnnnnnnnnnnnnnnnnnnnnnnnnnnnnnnnnnnnnnnnnnnnnnnnnnnnnnnnnnnnnnnnnnnnnnnnnnnnnnnnnnnnnnnnnnnnnnnnnnnnnnnnnnnnnnnnnnnnnnnnnnnnnnnnnnnnnnnnnnnnnnnnnnnnnnnnnnnnnnnnnnnnnnnnnnnnnnnnnnnnnnnnnnnnnnnnnnnnnnnnnnnnnnnnnnnnnnnnnnnnnnnnnnnnnnnnnnnnnnnnnnnnnnnnnnnnnnnnnnnnnnnnnnnnnnnnnnnnnnnnnnnnnnnnnnnnnnnnnnnnnnnnnnnnnnnnnnnnnnnnnnnnnnnnnnnnnnnnnnnnnnnnnnnnnnnnnnnnnnnnnnnnnnnnnnnnnnnnnnnnnnnnnnnnnnnnnnnnnnnnnnnnnnnnnnnnnnnnnnnnnnnnnnnnnnnnnnnnnnnnnnnnnnnnnnnnnnnnnnnnnnnnnnnnnnnnnnnnnnnnnnnnnnnnnnnnnnnnnnnnnnnnnnnnnnnnnnnnnnnnnnnnnnnnnnnnnnnnnnnnnnnnnnnnnnnnnnnnnnnnnnnnnnnnnnnnnnnnnnnnnnnnnnnnnnnnnnnnnnnnnnnnnnnnnnnnnnnnnnnnnnnnnnnnnnnnnnnnnnnnnnnnnnnnnnnnnnnnnnnnnnnnnnnnnnnnnnnnnnnnnnnnnnnnnnnnnnnnnnnnnnnnnnnnnnnnnnnnnnnnnnnnnnnnnnnnnnnnnnnnnnnnnnnnnnnnnnnnnnnnnnnnnnnnnnnnnnnnnnnnnnnnnnnnnnnnnnnnnnnnnnnnnnnnnnnnnnnnnnnnnnnnnnnnnnnnnnnnnnnnnnnnnnnnnnnnnnnnnnnnnnnnnnnnnnnnnnnnnnnnnnnnnnnnnnnnnnnnnnnnnnnnnnnnnnnnnnnnnnnnnnnnnnnnnnnnnnnnnnnnnnnnnnnnnnnnnnnnnnnnnnnnnnnnnnnnnnnnnnnnnnnnnnnnnnnnnnnnnnnnnnnnnnnnnnnnnnnnnnnnnnnnnnnnnnnnnnnnnnnnnnnnnnnnnnnnnnnnnnnnnnnnnnnnnnnnnnnnnnnnnnnnnnnnnnnnnnnnnnnnnnnnnnnnnnnnnnnnnnnnnnnnnnnnnnnnnnnnnnnnnnnnnnnnnnnnnnnnnnnnnnnnnnnnnnnnnnnnnnnnnnnnnnnnnnnnnnnnnnnnnnnnnnnnnnnnnnnnnnnnnnnnnnnnnnnnnnnnnnnnnnnnnnnnnnnnnnnnnnnnnnnnnnnnnnnnnnnnnnnnnnnnnnnnnnnnnnnnnnnnnnnnnnnnnnnnnnnnnnnnnnnnnnnnnnnnnnnnnnnnnnnnnnnnnnnnnnnnnnnnnnnnnnnnnnnnnnnnnnnnnnnnnnnnnnnnnnnnnnnnnnnnnnnnnnnnnnnnnnnnnnnnnnnnnnnnnnnnnnnnnnnnnnnnnnnnnnnnnnnnnnnnnnnnnnnnnnnnnnnnnnnnnnnnnnnnnnnnnnnnnnnnnnnnnnnnnnnnnnnnnnnnnnnnnnnnnnnnnnnnnnnnnnnnnnnnnnnnnnnnnnnnnnnnnnnnnnnnnnnnnnnnnnnnnnnnnnnnnnnnnnnnnnnnnnnnnnnnnnnnnnnnnnnnnnnnnnnnnnnnnnnnnnnnnnnnnnnnnnnnnnnnnnnnnnnnnnnnnnnnnnnnnnnnnnnnnnnnnnnnnnnnnnnnnnnnnnnnnnnnnnnnnnnnnnnnnnnnnnnnnnnnnnnnnnnnnnnnnnnnnnnnnnnnnnnnnnnnnnnnnnnnnnnnnnnnnnnnnnnnnnnnnnnnnnnnnnnnnnnnnnnnnnnnnnnnnnnnnnnnnnnnnnnnnnnnnnnnnnnnnnnnnnnnnnnnnnnnnnnnnnnnnnnnnnnnnnnnnnnnnnnnnnnnnnnnnnnnnnnnnnnnnnnnnnnnnnnnnnnnnnnnnnnnnnnnnnnnnnnnnnnnnnnnnnnnnnnnnnnnnnnnnnnnnnnnnnnnnnnnnnnnnnnnnnnnnnnnnnnnnnnnnnnnnnnnnnnnnnnnnnnnnnnnnnnnnnnnnnnnnnnnnnnnnnnnnnnnnnnnnnnnnnnnnnnnnnnnnnnnnnnnnnnnnnnnnnnnnnnnnnnnnnnnnnnnnnnnnnnnnnnnnnnnnnnnnnnnnnnnnnnnnnnnnnnnnnnnnnnnnnnnnnnnnnnnnnnnnnnnnnnnnnnnnnnnnnnnnnnnnnnnnnnnnnnnnnnnnnnnnnnnnnnnnnnnnnnnnnnnnnnnnnnnnnnnnnnnnnnnnnnnnnnnnnnnnnnnnnnnnnnnnnnnnnnnnnnnnnnnnnnnnnnnnnnnnnnnnnnnnnnnnnnnnnnnnnnnnnnnnnnnnnnnnnnnnnnnnnnnnnnnnnnnnnnnnnnnnnnnnnnnnnnnnnnnnnnnnnnnnnnnnnnnnnnnnnnnnnnnnnnnnnnnnnnnnnnnnnnnnnnnnnnnnnnnnnnnnnnnnnnnnnnnnnnnnnnnnnnnnnnnnnnnnnnnnnnnnnnnnnnnnnnnnnnnnnnnnnnnnnnnnnnnnnnnnnnnnnnnnnnnnnnnnnnnnnnnnnnnnnnnnnnnnnnnnnnnnnnnnnnnnnnnnnnnnnnnnnnnnnnnnnnnnnnnnnnnnnnnnnnnnnnnnnnnnnnnnnnnnnnnnnnnnnnnnnnnnnnnnnnnnnnnnnnnnnnnnnnnnnnnnnnnnnnnnnnnnnnnnnnnnnnnnnnnnnnnnnnnnnnnnnnnnnnnnnnnnnnnnnnnnnnnnnnnnnnnnnnnnnnnnnnnnnnnnnnnnnnnnnnnnnnnnnnnnnnnnnnnnnnnnnnnnnnnnnnnnnnnnnnnnnnnnnnnnnnnnnnnnnnnnnnnnnnnnnnnnnnnnnnnnnnnnnnnnnnnnnnnnnnnnnnnnnnnnnnnnnnnnnnnnnnnnnnnnnnnnnnnnnnnnnnnnnnnnnnnnnnnnnnnnnnnnnnnnnnnnnnnnnnnnnnnnnnnnnnnnnnnnnnnnnnnnnnnnnnnnnnnnnnnnnnnnnnnnnnnnnnnnnnnnnnnnnnnnnnnnnnnnnnnnnnnnnnnnnnnnnnnnnnnnnnnnnnnnnnnnnnnnnnnnnnnnnnnnnnnnnnnnnnnnnnnnnnnnnnnnnnnnnnnnnnnnnnnnnnnnnnnnnnnnnnnnnnnnnnnnnnnnnnnnnnnnnnnnnnnnnnnnnnnnnnnnnnnnnnnnnnnnnnnnnnnnnnnnnnnnnnnnnnnnnnnnnnnnnnnnnnnnnnnnnnnnnnnnnnnnnnnnnnnnnnnnnnnnnnnnnnnnnnnnnnnnnnnnnnnnnnnnnnnnnnnnnnnnnnnnnnnnnnnnnnnnnnnnnnnnnnnnnnnnnnnnnnnnnnnnnnnnnnnnnnnnnnnnnnnnnnnnnnnnnnnnnnnnnnnnnnnnnnnnnnnnnnnnnnnnnnnnnnnnnnnnnnnnnnnnnnnnnnnnnnnnnnnnnnnnnnnnnnnnnnnnnnnnnnnnnnnnnnnnnnnnnnnnnnnnnnnnnnnnnnnnnnnnnnnnnnnnnnnnnnnnnnnnnnnnnnnnnnnnnnnnnnnnnnnnnnnnnnnnnnnnnnnnnnnnnnnnnnnnnnnnnnnnnnnnnnnnnnnnnnnnnnnnnnnnnnnnnnnnnnnnnnnnnnnnnnnnnnnnnnnnnnnnnnnnnnnnnnnnnnnnnnnnnnnnnnnnnnnnnnnnnnnnnnnnnnnnnnnnnnnnnnnnnnnnnnnnnnnnnnnnnnnnnnnnnnnnnnnnnnnnnnnnnnnnnnnnnnnnnnnnnnnnnnnnnnnnnnnnnnnnnnnnnnnnnnnnnnnnnnnnnnnnnnnnnnnnnnnnnnnnnnnnnnnnnnnnnnnnnnnnnnnnnnnnnnnnnnnnnnnnnnnnnnnnnnnnnnnnnnnnnnnnnnnnnnnnnnnnnnnnnnnnnnnnnnnnnnnnnnnnnnnnnnnnnnnnnnnnnnnnnnnnnnnnnnnnnnnnnnnnnnnnnnnnnnnnnnnnnnnnnnnnnnnnnnnnnnnnnnnnnnnnnnnnnnnnnnnnnnnnnnnnnnnnnnnnnnnnnnnnnnnnnnnnnnnnnnnnnnnnnnnnnnnnnnnnnnnnnnnnnnnnnnnnnnnnnnnnnnnnnnnnnnnnnnnnnnnnnnnnnnnnnnnnnnnnnnnnnnnnnnnnnnnnnnnnnnnnnnnnnnnnnnnnnnnnnnnnnnnnnnnnnnnnnnnnnnnnnnnnnnnnnnnnnnnnnnnnnnnnnnnnnnnnnnnnnnnnnnnnnnnnnnnnnnnnnnnnnnnnnnnnnnnnnnnnnnnnnnnnnnnnnnnnnnnnnnnnnnnnnnnnnnnnnnnnnnnnnnnnnnnnnnnnnnnnnnnnnnnnnnnnnnnnnnnnnnnnnnnnnnnnnnnnnnnnnnnnnnnnnnnnnnnnnnnnnnnnnnnnnnnnnnnnnnnnnnnnnnnnnnnnnnnnnnnnnnnnnnnnnnnnnnnnnnnnnnnnnnnnnnnnnnnnnnnnnnnnnnnnnnnnnnnnnnnnnnnnnnnnnnnnnnnnnnnnnnnnnnnnnnnnnnnnnnnnnnnnnnnnnnnnnnnnnnnnnnnnnnnnnnnnnnnnnnnnnnnnnnnnnnnnnnnnnnnnnnnnnnnnnnnnnnnnnnnnnnnnnnnnnnnnnnnnnnnnnnnnnnnnnnnnnnnnnnnnnnnnnnnnnnnnnnnnnnnnnnnnnnnnnnnnnnnnnnnnnnnnnnnnnnnnnnnnnnnnnnnnnnnnnnnnnnnnnnnnnnnnnnnnnnnnnnnnnnnnnnnnnnnnnnnnnnnnnnnnnnnnnnnnnnnnnnnnnnnnnnnnnnnnnnnnnnnnnnnnnnnnnnnnnnnnnnnnnnnnnnnnnnnnnnnnnnnnnnnnnnnnnnnnnnnnnnnnnnnnnnnnnnnnnnnnnnnnnnnnnnnnnnnnnnnnnnnnnnnnnnnnnnnnnnnnnnnnnnnnnnnnnnnnnnnnnnnnnnnnnnnnnnnnnnnnnnnnnnnnnnnnnnnnnnnnnnnnnnnnnnnnnnnnnnnnnnnnnnnnnnnnnnnnnnnnnnnnnnnnnnnnnnnnnnnnnnnnnnnnnnnnnnnnnnnnnnnnnnnnnnnnnnnnnnnnnnnnnnnnnnnnnnnnnnnnnnnnnnnnnnnnnnnnnnnnnnnnnnnnnnnnnnnnnnnnnnnnnnnnnnnnnnnnnnnnnnnnnnnnnnnnnnnnnnnnnnnnnnnnnnnnnnnnnnnnnnnnnnnnnnnnnnnnnnnnnnnnnnnnnnnnnnnnnnnnnnnnnnnnnnnnnnnnnnnnnnnnnnnnnnnnnnnnnnnnnnnnnnnnnnnnnnnnnnnnnnnnnnnnnnnnnnnnnnnnnnnnnnnnnnnnnnnnnnnnnnnnnnnnnnnnnnnnnnnnnnnnnnnnnnnnnnnnnnnnnnnnnnnnnnnnnnnnnnnnnnnnnnnnnnnnnnnnnnnnnnnnnnnnnnnnnnnnnnnnnnnnnnnnnnnnnnnnnnnnnnnnnnnnnnnnnnnnnnnnnnnnnnnnnnnnnnnnnnnnnnnnnnnnnnnnnnnnnnnnnnnnnnnnnnnnnnnnnnnnnnnnnnnnnnnnnnnnnnnnnnnnnnnnnnnnnnnnnnnnnnnnnnnnnnnnnnnnnnnnnnnnnnnnnnnnnnnnnnnnnnnnnnnnnnnnnnnnnnnnnnnnnnnnnnnnnnnnnnnnnnnnnnnnnnnnnnnnnnnnnnnnnnnnnnnnnnnnnnnnnnnnnnnnnnnnnnnnnnnnnnnnnnnnnnnnnnnnnnnnnnnnnnnnnnnnnnnnnnnnnnnnnnnnnnnnnnnnnnnnnnnnnnnnnnnnnnnnnnnnnnnnnnnnnnnnnnnnnnnnnnnnnnnnnnnnnnnnnnnnnnnnnnnnnnnnnnnnnnnnnnnnnnnnnnnnnnnnnnnnnnnnnnnnnnnnnnnnnnnnnnnnnnnnnnnnnnnnnnnnnnnnnnnnnnnnnnnnnnnnnnnnnnnnnnnnnnnnnnnnnnnnnnnnnnnnnnnnnnnnnnnnnnnnnnnnnnnnnnnnnnnnnnnnnnnnnnnnnnnnnnnnnnnnnnnnnnnnnnnnnnnnnnnnnnnnnnnnnnnnnnnnnnnnnnnnnnnnnnnnnnnnnnnnnnnnnnnnnnnnnnnnnnnnnnnnnnnnnnnnnnnnnnnnnnnnnnnnnnnnnnnnnnnnnnnnnnnnnnnnnnnnnnnnnnnnnnnnnnnnnnnnnnnnnnnnnnnnnnnnnnnnnnnnnnnnnnnnnnnnnnnnnnnnnnnnnnnnnnnnnnnnnnnnnnnnnnnnnnnnnnnnnnnnnnnnnnnnnnnnnnnnnnnnnnnnnnnnnnnnnnnnnnnnnnnnnnnnnnnnnnnnnnnnnnnnnnnnnnnnnnnnnnnnnnnnnnnnnnnnnnnnnnnnnnnnnnnnnnnnnnnnnnnnnnnnnnnnnnnnnnnnnnnnnnnnnnnnnnnnnnnnnnnnnnnnnnnnnnnnnnnnnnnnnnnnnnnnnnnnnnnnnnnnnnnnnnnnnnnnnnnnnnnnnnnnnnnnnnnnnnnnnnnnnnnnnnnnnnnnnnnnnnnnnnnnnnnnnnnnnnnnnnnnnnnnnnnnnnnnnnnnnnnnnnnnnnnnnnnnnnnnnnnnnnnnnnnnnnnnnnnnnnnnnnnnnnnnnnnnnnnnnnnnnnnnnnnnnnnnnnnnnnnnnnnnnnnnnnnnnnnnnnnnnnnnnnnnnnnnnnnnnnnnnnnnnnnnnnnnnnnnnnnnnnnnnnnnnnnnnnnnnnnnnnnnnnnnnnnnnnnnnnnnnnnnnnnnnnnnnnnnnnnnnnnnnnnnnnnnnnnnnnnnnnnnnnnnnnnnnnnnnnnnnnnnnnnnnnnnnnnnnnnnnnnnnnnnnnnnnnnnnnnnnnnnnnnnnnnnnnnnnnnnnnnnnnnnnnnnnnnnnnnnnnnnnnnnnnnnnnnnnnnnnnnnnnnnnnnnnnnnnnnnnnnnnnnnnnnnnnnnnnnnnnnnnnnnnnnnnnnnnnnnnnnnnnnnnnnnnnnnnnnnnnnnnnnnnnnnnnnnnnnnnnnnnnnnnnnnnnnnnnnnnnnnnnnnnnnnnnnnnnnnnnnnnnnnnnnnnnnnnnnnnnnnnnnnnnnnnnnnnnnnnnnnnnnnnnnnnnnnnnnnnnnnnnnnnnnnnnnnnnnnnnnnnnnnnnnnnnnnnnnnnnnnnnnnnnnnnnnnnnnnnnnnnnnnnnnnnnnnnnnnnnnnnnnnnnnnnnnnnnnnnnnnnnnnnnnnnnnnnnnnnnnnnnnnnnnnnnnnnnnnnnnnnnnnnnnnnnnnnnnnnnnnnnnnnnnnnnnnnnnnnnnnnnnnnnnnnnnnnnnnnnnnnnnnnnnnnnnnnnnnnnnnnnnnnnnnnnnnnnnnnnnnnnnnnnnnnnnnnnnnnnnnnnnnnnnnnnnnnnnnnnnnnnnnnnnnnnnnnnnnnnnnnnnnnnnnnnnnnnnnnnnnnnnnnnnnnnnnnnnnnnnnnnnnnnnnnnnnnnnnnnnnnnnnnnnnnnnnnnnnnnnnnnnnnnnnnnnnnnnnnnnnnnnnnnnnnnnnnnnnnnnnnnnnnnnnnnnnnnnnnnnnnnnnnnnnnnnnnnnnnnnnnnnnnnnnnnnnnnnnnnnnnnnnnnnnnnnnnnnnnnnnnnnnnnnnnnnnnnnnnnnnnnnnnnnnnnnnnnnnnnnnnnnnnnnnnnnnnnnnnnnnnnnnnnnnnnnnnnnnnnnnnnnnnnnnnnnnnnnnnnnnnnnnnnnnnnnnnnnnnnnnnnnnnnnnnnnnnnnnnnnnnnnnnnnnnnnnnnnnnnnnnnnnnnnnnnnnnnnnnnnnnnnnnnnnnnnnnnnnnnnnnnnnnnnnnnnnnnnnnnnnnnnnnnnnnnnnnnnnnnnnnnnnnnnnnnnnnnnnnnnnnnnnnnnnnnnnnnnnnnnnnnnnnnnnnnnnnnnnnnnnnnnnnnnnnnnnnnnnnnnnnnnnnnnnnnnnnnnnnnnnnnnnnnnnnnnnnnnnnnnnnnnnnnnnnnnnnnnnnnnnnnnnnnnnnnnnnnnnnnnnnnnnnnnnnnnnnnnnnnnnnnnnnnnnnnnnnnnnnnnnnnnnnnnnnnnnnnnnnnnnnnnnnnnnnnnnnnnnnnnnnnnnnnnnnnnnnnnnnnnnnnnnnnnnnnnnnnnnnnnnnnnnnnnnnnnnnnnnnnnnnnnnnnnnnnnnnnnnnnnnnnnnnnnnnnnnnnnnnnnnnnnnnnnnnnnnnnnnnnnnnnnnnnnnnnnnnnnnnnnnnnnnnnnnnnnnnnnnnnnnnnnnnnnnnnnnnnnnnnnnnnnnnnnnnnnnnnnnnnnnnnnnnnnnnnnnnnnnnnnnnnnnnnnnnnnnnnnnnnnnnnnnnnnnnnnnnnnnnnnnnnnnnnnnnnnnnnnnnnnnnnnnnnnnnnnnnnnnnnnnnnnnnnnnnnnnnnnnnnnnnnnnnnnnnnnnnnnnnnnnnnnnnnnnnnnnnnnnnnnnnnnnnnnnnnnnnnnnnnnnnnnnnnnnnnnnnnnnnnnnnnnnnnnnnnnnnnnnnnnnnnnnnnnnnnnnnnnnnnnnnnnnnnnnnnnnnnnnnnnnnnnnnnnnnnnnnnnnnnnnnnnnnnnnnnnnnnnnnnnnnnnnnnnnnnnnnnnnnnnnnnnnnnnnnnnnnnnnnnnnnnnnnnnnnnnnnnnnnnnnnnnnnnnnnnnnnnnnnnnnnnnnnnnnnnnnnnnnnnnnnnnnnnnnnnnnnnnnnnnnnnnnnnnnnnnnnnnnnnnnnnnnnnnnnnnnnnnnnnnnnnnnnnnnnnnnnnnnnnnnnnnnnnnnnnnnnnnnnnnnnnnnnnnnnnnnnnnnnnnnnnnnnnnnnnnnnnnnnnnnnnnnnnnnnnnnnnnnnnnnnnnnnnnnnnnnnnnnnnnnnnnnnnnnnnnnnnnnnnnnnnnnnnnnnnnnnnnnnnnnnnnnnnnnnnnnnnnnnnnnnnnnnnnnnnnnnnnnnnnnnnnnnnnnnnnnnnnnnnnnnnnnnnnnnnnnnnnnnnnnnnnnnnnnnnnnnnnnnnnnnnnnnnnnnnnnnnnnnnnnnnnnnnnnnnnnnnnnnnnnnnnnnnnnnnnnnnnnnnnnnnnnnnnnnnnnnnnnnnnnnnnnnnnnnnnnnnnnnnnnnnnnnnnnnnnnnnnnnnnnnnnnnnnnnnnnnnnnnnnnnnnnnnnnnnnnnnnnnnnnnnnnnnnnnnnnnnnnnnnnnnnnnnnnnnnnnnnnnnnnnnnnnnnnnnnnnnnnnnnnnnnnnnnnnnnnnnnnnnnnnnnnnnnnnnnnnnnnnnnnnnnnnnnnnnnnnnnnnnnnnnnnnnnnnnnnnnnnnnnnnnnnnnnnnnnnnnnnnnnnnnnnnnnnnnnnnnnnnnnnnnnnnnnnnnnnnnnnnnnnnnnnnnnnnnnnnnnnnnnnnnnnnnnnnnnnnnnnnnnnnnnnnnnnnnnnnnnnnnnnnnnnnnnnnnnnnnnnnnnnnnnnnnnnnnnnnnnnnnnnnnnnnnnnnnnnnnnnnnnnnnnnnnnnnnnnnnnnnnnnnnnnnnnnnnnnnnnnnnnnnnnnnnnnnnnnnnnnnnnnnnnnnnnnnnnnnnnnnnnnnnnnnnnnnnnnnnnnnnnnnnnnnnnnnnnnnnnnnnnnnnnnnnnnnnnnnnnnnnnnnnnnnnnnnnnnnnnnnnnnnnnnnnnnnnnnnnnnnnnnnnnnnnnnnnnnnnnnnnnnnnnnnnnnnnnnnnnnnnnnnnnnnnnnnnnnnnnnnnnnnnnnnnnnnnnnnnnnnnnnnnnnnnnnnnnnnnnnnnnnnnnnnnnnnnnnnnnnnnnnnnnnnnnnnnnnnnnnnnnnnnnnnnnnnnnnnnnnnnnnnnnnnnnnnnnnnnnnnnnnnnnnnnnnnnnnnnnnnnnnnnnnnnnnnnnnnnnnnnnnnnnnnnnnnnnnnnnnnnnnnnnnnnnnnnnnnnnnnnnnnnnnnnnnnnnnnnnnnnnnnnnnnnnnnnnnnnnnnnnnnnnnnnnnnnnnnnnnnnnnnnnnnnnnnnnnnnnnnnnnnnnnnnnnnnnnnnnnnnnnnnnnnnnnnnnnnnnnnnnnnnnnnnnnnnnnnnnnnnnnnnnnnnnnnnnnnnnnnnnnnnnnnnnnnnnnnnnnnnnnnnnnnnnnnnnnnnnnnnnnnnnnnnnnnnnnnnnnnnnnnnnnnnnnnnnnnnnnnnnnnnnnnnnnnnnnnnnnnnnnnnnnnnnnnnnnnnnnnnnnnnnnnnnnnnnnnnnnnnnnnnnnnnnnnnnnnnnnnnnnnnnnnnnnnnnnnnnnnnnnnnnnnnnnnnnnnnnnnnnnnnnnnnnnnnnnnnnnnnnnnnnnnnnnnnnnnnnnnnnnnnnnnnnnnnnnnnnnnnnnnnnnnnnnnnnnnnnnnnnnnnnnnnnnnnnnnnnnnnnnnnnnnnnnnnnnnnnnnnnnnnnnnnnnnnnnnnnnnnnnnnnnnnnnnnnnnnnnnnnnnnnnnnnnnnnnnnnnnnnnnnnnnnnnnnnnnnnnnnnnnnnnnnnnnnnnnnnnnnnnnnnnnnnnnnnnnnnnnnnnnnnnnnnnnnnnnnnnnnnnnnnnnnnnnnnnnnnnnnnnnnnnnnnnnnnnnnnnnnnnnnnnnnnnnnnnnnnnnnnnnnnnnnnnnnnnnnnnnnnnnnnnnnnnnnnnnnnnnnnnnnnnnnnnnnnnnnnnnnnnnnnnnnnnnnnnnnnnnnnnnnnnnnnnnnnnnnnnnnnnnnnnnnnnnnnnnnnnnnnnnnnnnnnnnnnnnnnnnnnnnnnnnnnnnnnnnnnnnnnnnnnnnnnnnnnnnnnnnnnnnnnnnnnnnnnnnnnnnnnnnnnnnnnnnnnnnnnnnnnnnnnnnnnnnnnnnnnnnnnnnnnnnnnnnnnnnnnnnnnnnnnnnnnnnnnnnnnnnnnnnnnnnnnnnnnnnnnnnnnnnnnnnnnnnnnnnnnnnnnnnnnnnnnnnnnnnnnnnnnnnnnnnnnnnnnnnnnnnnnnnnnnnnnnnnnnnnnnnnnnnnnnnnnnnnnnnnnnnnnnnnnnnnnnnnnnnnnnnnnnnnnnnnnnnnnnnnnnnnnnnnnnnnnnnnnnnnnnnnnnnnnnnnnnnnnnnnnnnnnnnnnnnnnnnnnnnnnnnnnnnnnnnnnnnnnnnnnnnnnnnnnnnnnnnnnnnnnnnnnnnnnnnnnnnnnnnnnnnnnnnnnnnnnnnnnnnnnnnnnnnnnnnnnnnnnnnnnnnnnnnnnnnnnnnnnnnnnnnnnnnnnnnnnnnnnnnnnnnnnnnnnnnnnnnnnnnnnnnnnnnnnnnnnnnnnnnnnnnnnnnnnnnnnnnnnnnnnnnnnnnnnnnnnnnnnnnnnnnnnnnnnnnnnnnnnnnnnnnnnnnnnnnnnnnnnnnnnnnnnnnnnnnnnnnnnnnnnnnnnnnnnnnnnnnnnnnnnnnnnnnnnnnnnnnnnnnnnnnnnnnnnnnnnnnnnnnnnnnnnnnnnnnnnnnnnnnnnnnnnnnnnnnnnnnnnnnnnnnnnnnnnnnnnnnnnnnnnnnnnnnnnnnnnnnnnnnnnnnnnnnnnnnnnnnnnnnnnnnnnnnnnnnnnnnnnnnnnnnnnnnnnnnnnnnnnnnnnnnnnnnnnnnnnnnnnnnnnnnnnnnnnnnnnnnnnnnnnnnnnnnnnnnnnnnnnnnnnnnnnnnnnnnnnnnnnnnnnnnnnnnnnnnnnnnnnnnnnnnnnnnnnnnnnnnnnnnnnnnnnnnnnnnnnnnnnnnnnnnnnnnnnnnnnnnnnnnnnnnnnnnnnnnnnnnnnnnnnnnnnnnnnnnnnnnnnnnnnnnnnnnnnnnnnnnnnnnnnnnnnnnnnnnnnnnnnnnnnnnnnnnnnnnnnnnnnnnnnnnnnnnnnnnnnnnnnnnnnnnnnnnnnnnnnnnnnnnnnnnnnnnnnnnnnnnnnnnnnnnnnnnnnnnnnnnnnnnnnnnnnnnnnnnnnnnnnnnnnnnnnnnnnnnnnnnnnnnnnnnnnnnnnnnnnnnnnnnnnnnnnnnnnnnnnnnnnnnnnnnnnnnnnnnnnnnnnnnnnnnnnnnnnnnnnnnnnnnnnnnnnnnnnnnnnnnnnnnnnnnnnnnnnnnnnnnnnnnnnnnnnnnnnnnnnnnnnnnnnnnnnnnnnnnnnnnnnnnnnnnnnnnnnnnnnnnnnnnnnnnnnnnnnnnnnnnnnnnnnnnnnnnnnnnnnnnnnnnnnnnnnnnnnnnnnnnnnnnnnnnnnnnnnnnnnnnnnnnnnnnnnnnnnnnnnnnnnnnnnnnnnnnnnnnnnnnnnnnnnnnnnnnnnnnnnnnnnnnnnnnnnnnnnnnnnnnnnnnnnnnnnnnnnnnnnnnnnnnnnnnnnnnnnnnnnnnnnnnnnnnnnnnnnnnnnnnnnnnnnnnnnnnnnnnnnnnnnnnnnnnnnnnnnnnnnnnnnnnnnnnnnnnnnnnnnnnnnnnnnnnnnnnnnnnnnnnnnnnnnnnnnnnnnnnnnnnnnnnnnnnnnnnnnnnnnnnnnnnnnnnnnnnnnnnnnnnnnnnnnnnnnnnnnnnnnnnnnnnnnnnnnnnnnnnnnnnnnnnnnnnnnnnnnnnnnnnnnnnnnnnnnnnnnnnnnnnnnnnnnnnnnnnnnnnnnnnnnnnnnnnnnnnnnnnnnnnnnnnnnnnnnnnnnnnnnnnnnnnnnnnnnnnnnnnnnnnnnnnnnnnnnnnnnnnnnnnnnnnnnnnnnnnnnnnnnnnnnnnnnnnnnnnnnnnnnnnnnnnnnnnnnnnnnnnnnnnnnnnnnnnnnnnnnnnnnnnnnnnnnnnnnnnnnnnnnnnnnnnnnnnnnnnnnnnnnnnnnnnnnnnnnnnnnnnnnnnnnnnnnnnnnnnnnnnnnnnnnnnnnnnnnnnnnnnnnnnnnnnnnnnnnnnnnnnnnnnnnnnnnnnnnnnnnnnnnnnnnnnnnnnnnnnnnnnnnnnnnnnnnnnnnnnnnnnnnnnnnnnnnnnnnnnnnnnnnnnnnnnnnnnnnnnnnnnnnnnnnnnnnnnnnnnnnnnnnnnnnnnnnnnnnnnnnnnnnnnnnnnnnnnnnnnnnnnnnnnnnnnnnnnnnnnnnnnnnnnnnnnnnnnnnnnnnnnnnnnnnnnnnnnnnnnnnnnnnnnnnnnnnnnnnnnnnnnnnnnnnnnnnnnnnnnnnnnnnnnnnnnnnnnnnnnnnnnnnnnnnnnnnnnnnnnnnnnnnnnnnnnnnnnnnnnnnnnnnnnnnnnnnnnnnnnnnnnnnnnnnnnnnnnnnnnnnnnnnnnnnnnnnnnnnnnnnnnnnnnnnnnnnnnnnnnnnnnnnnnnnnnnnnnnnnnnnnnnnnnnnnnnnnnnnnnnnnnnnnnnnnnnnnnnnnnnnnnnnnnnnnnnnnnnnnnnnnnnnnnnnnnnnnnnnnnnnnnnnnnnnnnnnnnnnnnnnnnnnnnnnnnnnnnnnnnnnnnnnnnnnnnnnnnnnnnnnnnnnnnnnnnnnnnnnnnnnnnnnnnnnnnnnnnnnnnnnnnnnnnnnnnnnnnnnnnnnnnnnnnnnnnnnnnnnnnnnnnnnnnnnnnnnnnnnnnnnnnnnnnnnnnnnnnnnnnnnnnnnnnnnnnnnnnnnnnnnnnnnnnnnnnnnnnnnnnnnnnnnnnnnnnnnnnnnnnnnnnnnnnnnnnnnnnnnnnnnnnnnnnnnnnnnnnnnnnnnnnnnnnnnnnnnnnnnnnnnnnnnnnnnnnnnnnnnnnnnnnnnnnnnnnnnnnnnnnnnnnnnnnnnnnnnnnnnnnnnnnnnnnnnnnnnnnnnnnnnnnnnnnnnnnnnnnnnnnnnnnnnnnnnnnnnnnnnnnnnnnnnnnnnnnnnnnnnnnnnnnnnnnnnnnnnnnnnnnnnnnnnnnnnnnnnnnnnnnnnnnnnnnnnnnnnnnnnnnnnnnnnnnnnnnnnnnnnnnnnnnnnnnnnnnnnnnnnnnnnnnnnnnnnnnnnnnnnnnnnnnnnnnnnnnnnnnnnnnnnnnnnnnnnnnnnnnnnnnnnnnnnnnnnnnnnnnnnnnnnnnnnnnnnnnnnnnnnnnnnnnnnnnnnnnnnnnnnnnnnnnnnnnnnnnnnnnnnnnnnnnnnnnnnnnnnnnnnnnnnnnnnnnnnnnnnnnnnnnnnnnnnnnnnnnnnnnnnnnnnnnnnnnnnnnnnnnnnnnnnnnnnnnnnnnnnnnnnnnnnnnnnnnnnnnnnnnnnnnnnnnnnnnnnnnnnnnnnnnnnnnnnnnnnnnnnnnnnnnnnnnnnnnnnnnnnnnnnnnnnnnnnnnnnnnnnnnnnnnnnnnnnnnnnnnnnnnnnnnnnnnnnnnnnnnnnnnnnnnnnnnnnnnnnnnnnnnnnnnnnnnnnnnnnnnnnnnnnnnnnnnnnnnnnnnnnnnnnnnnnnnnnnnnnnnnnnnnnnnnnnnnnnnnnnnnnnnnnnnnnnnnnnnnnnnnnnnnnnnnnnnnnnnnnnnnnnnnnnnnnnnnnnnnnnnnnnnnnnnnnnnnnnnnnnnnnnnnnnnnnnnnnnnnnnnnnnnnnnnnnnnnnnnnnnnnnnnnnnnnnnnnnnnnnnnnnnnnnnnnnnnnnnnnnnnnnnnnnnnnnnnnnnnnnnnnnnnnnnnnnnnnnnnnnnnnnnnnnnnnnnnnnnnnnnnnnnnnnnnnnnnnnnnnnnnnnnnnnnnnnnnnnnnnnnnnnnnnnnnnnnnnnnnnnnnnnnnnnnnnnnnnnnnnnnnnnnnnnnnnnnnnnnnnnnnnnnnnnnnnnnnnnnnnnnnnnnnnnnnnnnnnnnnnnnnnnnnnnnnnnnnnnnnnnnnnnnnnnnnnnnnnnnnnnnnnnnnnnnnnnnnnnnnnnnnnnnnnnnnnnnnnnnnnnnnnnnnnnnnnnnnnnnnnnnnnnnnnnnnnnnnnnnnnnnnnnnnnnnnnnnnnnnnnnnnnnnnnnnnnnnnnnnnnnnnnnnnnnnnnnnnnnnnnnnnnnnnnnnnnnnnnnnnnnnnnnnnnnnnnnnnnnnnnnnnnnnnnnnnnnnnnnnnnnnnnnnnnnnnnnnnnnnnnnnnnnnnnnnnnnnnnnnnnnnnnnnnnnnnnnnnnnnnnnnnnnnnnnnnnnnnnnnnnnnnnnnnnnnnnnnnnnnnnnnnnnnnnnnnnnnnnnnnnnnnnnnnnnnnnnnnnnnnnnnnnnnnnnnnnnnnnnnnnnnnnnnnnnnnnnnnnnnnnnnnnnnnnnnnnnnnnnnnnnnnnnnnnnnnnnnnnnnnnnnnnnnnnnnnnnnnnnnnnnnnnnnnnnnnnnnnnnnnnnnnnnnnnnnnnnnnnnnnnnnnnnnnnnnnnnnnnnnnnnnnnnnnnnnnnnnnnnnnnnnnnnnnnnnnnnnnnnnnnnnnnnnnnnnnnnnnnnnnnnnnnnnnnnnnnnnnnnnnnnnnnnnnnnnnnnnnnnnnnnnnnnnnnnnnnnnnnnnnnnnnnnnnnnnnnnnnnnnnnnnnnnnnnnnnnnnnnnnnnnnnnnnnnnnnnnnnnnnnnnnnnnnnnnnnnnnnnnnnnnnnnnnnnnnnnnnnnnnnnnnnnnnnnnnnnnnnnnnnnnnnnnnnnnnnnnnnnnnnnnnnnnnnnnnnnnnnnnnnnnnnnnnnnnnnnnnnnnnnnnnnnnnnnnnnnnnnnnnnnnnnnnnnnnnnnnnnnnnnnnnnnnnnnnnnnnnnnnnnnnnnnnnnnnnnnnnnnnnnnnnnnnnnnnnnnnnnnnnnnnnnnnnnnnnnnnnnnnnnnnnnnnnnnnnnnnnnnnnnnnnnnnnnnnnnnnnnnnnnnnnnnnnnnnnnnnnnnnnnnnnnnnnnnnnnnnnnnnnnnnnnnnnnnnnnnnnnnnnnnnnnnnnnnnnnnnnnnnnnnnnnnnnnnnnnnnnnnnnnnnnnnnnnnnnnnnnnnnnnnnnnnnnnnnnnnnnnnnnnnnnnnnnnnnnnnnnnnnnnnnnnnnnnnnnnnnnnnnnnnnnnnnnnnnnnnnnnnnnnnnnnnnnnnnnnnnnnnnnnnnnnnnnnnnnnnnnnnnnnnnnnnnnnnnnnnnnnnnnnnnnnnnnnnnnnnnnnnnnnnnnnnnnnnnnnnnnnnnnnnnnnnnnnnnnnnnnnnnnnnnnnnnnnnnnnnnnnnnnnnnnnnnnnnnnnnnnnnnnnnnnnnnnnnnnnnnnnnnnnnnnnnnnnnnnnnnnnnnnnnnnnnnnnnnnnnnnnnnnnnnnnnnnnnnnnnnnnnnnnnnnnnnnnnnnnnnnnnnnnnnnnnnnnnnnnnnnnnnnnnnnnnnnnnnnnnnnnnnnnnnnnnnnnnnnnnnnnnnnnnnnnnnnnnnnnnnnnnnnnnnnnnnnnnnnnnnnnnnnnnnnnnnnnnnnnnnnnnnnnnnnnnnnnnnnnnnnnnnnnnnnnnnnnnnnnnnnnnnnnnnnnnnnnnnnnnnnnnnnnnnnnnnnnnnnnnnnnnnnnnnnnnnnnnnnnnnnnnnnnnnnnnnnnnnnnnnnnnnnnnnnnnnnnnnnnnnnnnnnnnnnnnnnnnnnnnnnnnnnnnnnnnnnnnnnnnnnnnnnnnnnnnnnnnnnnnnnnnnnnnnnnnnnnnnnnnnnnnnnnnnnnnnnnnnnnnnnnnnnnnnnnnnnnnnnnnnnnnnnnnnnnnnnnnnnnnnnnnnnnnnnnnnnnnnnnnnnnnnnnnnnnnnnnnnnnnnnnnnnnnnnnnnnnnnnnnnnnnnnnnnnnnnnnnnnnnnnnnnnnnnnnnnnnnnnnnnnnnnnnnnnnnnnnnnnnnnnnnnnnnnnnnnnnnnnnnnnnnnnnnnnnnnnnnnnnnnnnnnnnnnnnnnnnnnnnnnnnnnnnnnnnnnnnnnnnnnnnnnnnnnnnnnnnnnnnnnnnnnnnnnnnnnnnnnnnnnnnnnnnnnnnnnnnnnnnnnnnnnnnnnnnnnnnnnnnnnnnnnnnnnnnnnnnnnnnnnnnnnnnnnnnnnnnnnnnnnnnnnnnnnnnnnnnnnnnnnnnnnnnnnnnnnnnnnnnnnnnnnnnnnnnnnnnnnnnnnnnnnnnnnnnnnnnnnnnnnnnnnnnnnnnnnnnnnnnnnnnnnnnnnnnnnnnnnnnnnnnnnnnnnnnnnnnnnnnnnnnnnnnnnnnnnnnnnnnnnnnnnnnnnnnnnnnnnnnnnnnnnnnnnnnnnnnnnnnnnnnnnnnnnnnnnnnnnnnnnnnnnnnnnnnnnnnnnnnnnnnnnnnnnnnnnnnnnnnnnnnnnnnnnnnnnnnnnnnnnnnnnnnnnnnnnnnnnnnnnnnnnnnnnnnnnnnnnnnnnnnnnnnnnnnnnnnnnnnnnnnnnnnnnnnnnnnnnnnnnnnnnnnnnnnnnnnnnnnnnnnnnnnnnnnnnnnnnnnnnnnnnnnnnnnnnnnnnnnnnnnnnnnnnnnnnnnnnnnnnnnnnnnnnnnnnnnnnnnnnnnnnnnnnnnnnnnnnnnnnnnnnnnnnnnnnnnnnnnnnnnnnnnnnnnnnnnnnnnnnnnnnnnnnnnnnnnnnnnnnnnnnnnnnnnnnnnnnnnnnnnnnnnnnnnnnnnnnnnnnnnnnnnnnnnnnnnnnnnnnnnnnnnnnnnnnnnnnnnnnnnnnnnnnnnnnnnnnnnnnnnnnnnnnnnnnnnnnnnnnnnnnnnnnnnnnnnnnnnnnnnnnnnnnnnnnnnnnnnnnnnnnnnnnnnnnnnnnnnnnnnnnnnnnnnnnnnnnnnnnnnnnnnnnnnnnnnnnnnnnnnnnnnnnnnnnnnnnnnnnnnnnnnnnnnnnnnnnnnnnnnnnnnnnnnnnnnnnnnnnnnnnnnnnnnnnnnnnnnnnnnnnnnnnnnnnnnnnnnnnnnnnnnnnnnnnnnnnnnnnnnnnnnnnnnnnnnnnnnnnnnnnnnnnnnnnnnnnnnnnnnnnnnnnnnnnnnnnnnnnnnnnnnnnnnnnnnnnnnnnnnnnnnnnnnnnnnnnnnnnnnnnnnnnnnnnnnnnnnnnnnnnnnnnnnnnnnnnnnnnnnnnnnnnnnnnnnnnnnnnnnnnnnnnnnnnnnnnnnnnnnnnnnnnnnnnnnnnnnnnnnnnnnnnnnnnnnnnnnnnnnnnnnnnnnnnnnnnnnnnnnnnnnnnnnnnnnnnnnnnnnnnnnnnnnnnnnnnnnnnnnnnnnnnnnnnnnnnnnnnnnnnnnnnnnnnnnnnnnnnnnnnnnnnnnnnnnnnnnnnnnnnnnnnnnnnnnnnnnnnnnnnnnnnnnnnnnnnnnnnnnnnnnnnnnnnnnnnnnnnnnnnnnnnnnnnnnnnnnnnnnnnnnnnnnnnnnnnnnnnnnnnnnnnnnnnnnnnnnnnnnnnnnnnnnnnnnnnnnnnnnnnnnnnnnnnnnnnnnnnnnnnnnnnnnnnnnnnnnnnnnnnnnnnnnnnnnnnnnnnnnnnnnnnnnnnnnnnnnnnnnnnnnnnnnnnnnnnnnnnnnnnnnnnnnnnnnnnnnnnnnnnnnnnnnnnnnnnnnnnnnnnnnnnnnnnnnnnnnnnnnnnnnnnnnnnnnnnnnnnnnnnnnnnnnnnnnnnnnnnnnnnnnnnnnnnnnnnnnnnnnnnnnnnnnnnnnnnnnnnnnnnnnnnnnnnnnnnnnnnnnnnnnnnnnnnnnnnnnnnnnnnnnnnnnnnnnnnnnnnnnnnnnnnnnnnnnnnnnnnnnnnnnnnnnnnnnnnnnnnnnnnnnnnnnnnnnnnnnnnnnnnnnnnnnnnnnnnnnnnnnnnnnnnnnnnnnnnnnnnnnnnnnnnnnnnnnnnnnnnnnnnnnnnnnnnnnnnnnnnnnnnnnnnnnnnnnnnnnnnnnnnnnnnnnnnnnnnnnnnnnnnnnnnnnnnnnnnnnnnnnnnnnnnnnnnnnnnnnnnnnnnnnnnnnnnnnnnnnnnnnnnnnnnnnnnnnnnnnnnnnnnnnnnnnnnnnnnnnnnnnnnnnnnnnnnnnnnnnnnnnnnnnnnnnnnnnnnnnnnnnnnnnnnnnnnnnnnnnnnnnnnnnnnnnnnnnnnnnnnnnnnnnnnnnnnnnnnnnnnnnnnnnnnnnnnnnnnnnnnnnnnnnnnnnnnnnnnnnnnnnnnnnnnnnnnnnnnnnnnnnnnnnnnnnnnnnnnnnnnnnnnnnnnnnnnnnnnnnnnnnnnnnnnnnnnnnnnnnnnnnnnnnnnnnnnnnnnnnnnnnnnnnnnnnnnnnnnnnnnnnnnnnnnnnnnnnnnnnnnnnnnnnnnnnnnnnnnnnnnnnnnnnnnnnnnnnnnnnnnnnnnnnnnnnnnnnnnnnnnnnnnnnnnnnnnnnnnnnnnnnnnnnnnnnnnnnnnnnnnnnnnnnnnnnnnnnnnnnnnnnnnnnnnnnnnnnnnnnnnnnnnnnnnnnnnnnnnnnnnnnnnnnnnnnnnnnnnnnnnnnnnnnnnnnnnnnnnnnnnnnnnnnnnnnnnnnnnnnnnnnnnnnnnnnnnnnnnnnnnnnnnnnnnnnnnnnnnnnnnnnnnnnnnnnnnnnnnnnnnnnnnnnnnnnnnnnnnnnnnnnnnnnnnnnnnnnnnnnnnnnnnnnnnnnnnnnnnnnnnnnnnnnnnnnnnnnnnnnnnnnnnnnnnnnnnnnnnnnnnnnnnnnnnnnnnnnnnnnnnnnnnnnnnnnnnnnnnnnnnnnnnnnnnnnnnnnnnnnnnnnnnnnnnnnnnnnnnnnnnnnnnnnnnnnnnnnnnnnnnnnnnnnnnnnnnnnnnnnnnnnnnnnnnnnnnnnnnnnnnnnnnnnnnnnnnnnnnnnnnnnnnnnnnnnnnnnnnnnnnnnnnnnnnnnnnnnnnnnnnnnnnnnnnnnnnnnnnnnnnnnnnnnnnnnnnnnnnnnnnnnnnnnnnnnnnnnnnnnnnnnnnnnnnnnnnnnnnnnnnnnnnnnnnnnnnnnnnnnnnnnnnnnnnnnnnnnnnnnnnnnnnnnnnnnnnnnnnnnnnnnnnnnnnnnnnnnnnnnnnnnnnnnnnnnnnnnnnnnnnnnnnnnnnnnnnnnnnnnnnnnnnnnnnnnnnnnnnnnnnnnnnnnnnnnnnnnnnnnnnnnnnnnnnnnnnnnnnnnnnnnnnnnnnnnnnnnnnnnnnnnnnnnnnnnnnnnnnnnnnnnnnnnnnnnnnnnnnnnnnnnnnnnnnnnnnnnnnnnnnnnnnnnnnnnnnnnnnnnnnnnnnnnnnnnnnnnnnnnnnnnnnnnnnnnnnnnnnnnnnnnnnnnnnnnnnnnnnnnnnnnnnnnnnnnnnnnnnnnnnnnnnnnnnnnnnnnnnnnnnnnnnnnnnnnnnnnnnnnnnnnnnnnnnnnnnnnnnnnnnnnnnnnnnnnnnnnnnnnnnnnnnnnnnnnnnnnnnnnnnnnnnnnnnnnnnnnnnnnnnnnnnnnnnnnnnnnnnnnnnnnnnnnnnnnnnnnnnnnnnnnnnnnnnnnnnnnnnnnnnnnnnnnnnnnnnnnnnnnnnnnnnnnnnnnnnnnnnnnnnnnnnnnnnnnnnnnnnnnnnnnnnnnnnnnnnnnnnnnnnnnnnnnnnnnnnnnnnnnnnnnnnnnnnnnnnnnnnnnnnnnnnnnnnnnnnnnnnnnnnnnnnnnnnnnnnnnnnnnnnnnnnnnnnnnnnnnnnnnnnnnnnnnnnnnnnnnnnnnnnnnnnnnnnnnnnnnnnnnnnnnnnnnnnnnnnnnnnnnnnnnnnnnnnnnnnnnnnnnnnnnnnnnnnnnnnnnnnnnnnnnnnnnnnnnnnnnnnnnnnnnnnnnnnnnnnnnnnnnnnnnnnnnnnnnnnnnnnnnnnnnnnnnnnnnnnnnnnnnnnnnnnnnnnnnnnnnnnnnnnnnnnnnnnnnnnnnnnnnnnnnnnnnnnnnnnnnnnnnnnnnnnnnnnnnnnnnnnnnnnnnnnnnnnnnnnnnnnnnnnnnnnnnnnnnnnnnnnnnnnnnnnnnnnnnnnnnnnnnnnnnnnnnnnnnnnnnnnnnnnnnnnnnnnnnnnnnnnnnnnnnnnnnnnnnnnnnnnnnnnnnnnnnnnnnnnnnnnnnnnnnnnnnnnnnnnnnnnnnnnnnnnnnnnnnnnnnnnnnnnnnnnnnnnnnnnnnnnnnnnnnnnnnnnnnnnnnnnnnnnnnnnnnnnnnnnnnnnnnnnnnnnnnnnnnnnnnnnnnnnnnnnnnnnnnnnnnnnnnnnnnnnnnnnnnnnnnnnnnnnnnnnnnnnnnnnnnnnnnnnnnnnnnnnnnnnnnnnnnnnnnnnnnnnnnnnnnnnnnnnnnnnnnnnnnnnnnnnnnnnnnnnnnnnnnnnnnnnnnnnnnnnnnnnnnnnnnnnnnnnnnnnnnnnnnnnnnnnnnnnnnnnnnnnnnnnnnnnnnnnnnnnnnnnnnnnnnnnnnnnnnnnnnnnnnnnnnnnnnnnnnnnnnnnnnnnnnnnnnnnnnnnnnnnnnnnnnnnnnnnnnnnnnnnnnnnnnnnnnnnnnnnnnnnnnnnnnnnnnnnnnnnnnnnnnnnnnnnnnnnnnnnnnnnnnnnnnnnnnnnnnnnnnnnnnnnnnnnnnnnnnnnnnnnnnnnnnnnnnnnnnnnnnnnnnnnnnnnnnnnnnnnnnnnnnnnnnnnnnnnnnnnnnnnnnnnnnnnnnnnnnnnnnnnnnnnnnnnnnnnnnnnnnnnnnnnnnnnnnnnnnnnnnnnnnnnnnnnnnnnnnnnnnnnnnnnnnnnnnnnnnnnnnnnnnnnnnnnnnnnnnnnnnnnnnnnnnnnnnnnnnnnnnnnnnnnnnnnnnnnnnnnnnnnnnnnnnnnnnnnnnnnnnnnnnnnnnnnnnnnnnnnnnnnnnnnnnnnnnnnnnnnnnnnnnnnnnnnnnnnnnnnnnnnnnnnnnnnnnnnnnnnnnnnnnnnnnnnnnnnnnnnnnnnnnnnnnnnnnnnnnnnnnnnnnnnnnnnnnnnnnnnnnnnnnnnnnnnnnnnnnnnnnnnnnnnnnnnnnnnnnnnnnnnnnnnnnnnnnnnnnnnnnnnnnnnnnnnnnnnnnnnnnnnnnnnnnnnnnnnnnnnnnnnnnnnnnnnnnnnnnnnnnnnnnnnnnnnnnnnnnnnnnnnnnnnnnnnnnnnnnnnnnnnnnnnnnnnnnnnnnnnnnnnnnnnnnnnnnnnnnnnnnnnnnnnnnnnnnnnnnnnnnnnnnnnnnnnnnnnnnnnnnnnnnnnnnnnnnnnnnnnnnnnnnnnnnnnnnnnnnnnnnnnnnnnnnnnnnnnnnnnnnnnnnnnnnnnnnnnnnnnnnnnnnnnnnnnnnnnnnnnnnnnnnnnnnnnnnnnnnnnnnnnnnnnnnnnnnnnnnnnnnnnnnnnnnnnnnnnnnnnnnnnnnnnnnnnnnnnnnnnnnnnnnnnnnnnnnnnnnnnnnnnnnnnnnnnnnnnnnnnnnnnnnnnnnnnnnnnnnnnnnnnnnnnnnnnnnnnnnnnnnnnnnnnnnnnnnnnnnnnnnnnnnnnnnnnnnnnnnnnnnnnnnnnnnnnnnnnnnnnnnnnnnnnnnnnnnnnnnnnnnnnnnnnnnnnnnnnnnnnnnnnnnnnnnnnnnnnnnnnnnnnnnnnnnnnnnnnnnnnnnnnnnnnnnnnnnnnnnnnnnnnnnnnnnnnnnnnnnnnnnnnnnnnnnnnnnnnnnnnnnnnnnnnnnnnnnnnnnnnnnnnnnnnnnnnnnnnnnnnnnnnnnnnnnnnnnnnnnnnnnnnnnnnnnnnnnnnnnnnnnnnnnnnnnnnnnnnnnnnnnnnnnnnnnnnnnnnnnnnnnnnnnnnnnnnnnnnnnnnnnnnnnnnnnnnnnnnnnnnnnnnnnnnnnnnnnnnnnnnnnnnnnnnnnnnnnnnnnnnnnnnnnnnnnnnnnnnnnnnnnnnnnnnnnnnnnnnnnnnnnnnnnnnnnnnnnnnnnnnnnnnnnnnnnnnnnnnnnnnnnnnnnnnnnnnnnnnnnnnnnnnnnnnnnnnnnnnnnnnnnnnnnnnnnnnnnnnnnnnnnnnnnnnnnnnnnnnnnnnnnnnnnnnnnnnnnnnnnnnnnnnnnnnnnnnnnnnnnnnnnnnnnnnnnnnnnnnnnnnnnnnnnnnnnnnnnnnnnnnnnnnnnnnnnnnnnnnnnnnnnnnnnnnnnnnnnnnnnnnnnnnnnnnnnnnnnnnnnnnnnnnnnnnnnnnnnnnnnnnnnnnnnnnnnnnnnnnnnnnnnnnnnnnnnnnnnnnnnnnnnnnnnnnnnnnnnnnnnnnnnnnnnnnnnnnnnnnnnnnnnnnnnnnnnnnnnnnnnnnnnnnnnnnnnnnnnnnnnnnnnnnnnnnnnnnnnnnnnnnnnnnnnnnnnnnnnnnnnnnnnnnnnnnnnnnnnnnnnnnnnnnnnnnnnnnnnnnnnnnnnnnnnnnnnnnnnnnnnnnnnnnnnnnnnnnnnnnnnnnnnnnnnnnnnnnnnnnnnnnnnnnnnnnnnnnnnnnnnnnnnnnnnnnnnnnnnnnnnnnnnnnnnnnnnnnnnnnnnnnnnnnnnnnnnnnnnnnnnnnnnnnnnnnnnnnnnnnnnnnnnnnnnnnnnnnnnnnnnnnnnnnnnnnnnnnnnnnnnnnnnnnnnnnnnnnnnnnnnnnnnnnnnnnnnnnnnnnnnnnnnnnnnnnnnnnnnnnnnnnnnnnnnnnnnnnnnnnnnnnnnnnnnnnnnnnnnnnnnnnnnnnnnnnnnnnnnnnnnnnnnnnnnnnnnnnnnnnnnnnnnnnnnnnnnnnnnnnnnnnnnnnnnnnnnnnnnnnnnnnnnnnnnnnnnnnnnnnnnnnnnnnnnnnnnnnnnnnnnnnnnnnnnnnnnnnnnnnnnnnnnnnnnnnnnnnnnnnnnnnnnnnnnnnnnnnnnnnnnnnnnnnnnnnnnnnnnnnnnnnnnnnnnnnnnnnnnnnnnnnnnnnnnnnnnnnnnnnnnnnnnnnnnnnnnnnnnnnnnnnnnnnnnnnnnnnnnnnnnnnnnnnnnnnnnnnnnnnnnnnnnnnnnnnnnnnnnnnnnnnnnnnnnnnnnnnnnnnnnnnnnnnnnnnnnnnnnnnnnnnnnnnnnnnnnnnnnnnnnnnnnnnnnnnnnnnnnnnnnnnnnnnnnnnnnnnnnnnnnnnnnnnnnnnnnnnnnnnnnnnnnnnnnnnnnnnnnnnnnnnnnnnnnnnnnnnnnnnnnnnnnnnnnnnnnnnnnnnnnnnnnnnnnnnnnnnnnnnnnnnnnnnnnnnnnnnnnnnnnnnnnnnnnnnnnnnnnnnnnnnnnnnnnnnnnnnnnnnnnnnnnnnnnnnnnnnnnnnnnnnnnnnnnnnnnnnnnnnnnnnnnnnnnnnnnnnnnnnnnnnnnnnnnnnnnnnnnnnnnnnnnnnnnnnnnnnnnnnnnnnnnnnnnnnnnnnnnnnnnnnnnnnnnnnnnnnnnnnnnnnnnnnnnnnnnnnnnnnnnnnnnnnnnnnnnnnnnnnnnnnnnnnnnnnnnnnnnnnnnnnnnnnnnnnnnnnnnnnnnnnnnnnnnnnnnnnnnnnnnnnnnnnnnnnnnnnnnnnnnnnnnnnnnnnnnnnnnnnnnnnnnnnnnnnnnnnnnnnnnnnnnnnnnnnnnnnnnnnnnnnnnnnnnnnnnnnnnnnnnnnnnnnnnnnnnnnnnnnnnnnnnnnnnnnnnnnnnnnnnnnnnnnnnnnnnnnnnnnnnnnnnnnnnnnnnnnnnnnnnnnnnnnnnnnnnnnnnnnnnnnnnnnnnnnnnnnnnnnnnnnnnnnnnnnnnnnnnnnnnnnnnnnnnnnnnnnnnnnnnnnnnnnnnnnnnnnnnnnnnnnnnnnnnnnnnnnnnnnnnnnnnnnnnnnnnnnnnnnnnnnnnnnnnnnnnnnnnnnnnnnnnnnnnnnnnnnnnnnnnnnnnnnnnnnnnnnnnnnnnnnnnnnnnnnnnnnnnnnnnnnnnnnnnnnnnnnnnnnnnnnnnnnnnnnnnnnnnnnnnnnnnnnnnnnnnnnnnnnnnnnnnnnnnnnnnnnnnnnnnnnnnnnnnnnnnnnnnnnnnnnnnnnnnnnnnnnnnnnnnnnnnnnnnnnnnnnnnnnnnnnnnnnnnnnnnnnnnnnnnnnnnnnnnnnnnnnnnnnnnnnnnnnnnnnnnnnnnnnnnnnnnnnnnnnnnnnnnnnnnnnnnnnnnnnnnnnnnnnnnnnnnnnnnnnnnnnnnnnnnnnnnnnnnnnnnnnnnnnnnnnnnnnnnnnnnnnnnnnnnnnnnnnnnnnnnnnnnnnnnnnnnnnnnnnnnnnnnnnnnnnnnnnnnnnnnnnnnnnnnnnnnnnnnnnnnnnnnnnnnnnnnnnnnnnnnnnnnnnnnnnnnnnnnnnnnnnnnnnnnnnnnnnnnnnnnnnnnnnnnnnnnnnnnnnnnnnnnnnnnnnnnnnnnnnnnnnnnnnnnnnnnnnnnnnnnnnnnnnnnnnnnnnnnnnnnnnnnnnnnnnnnnnnnnnnnnnnnnnnnnnnnnnnnnnnnnnnnnnnnnnnnnnnnnnnnnnnnnnnnnnnnnnnnnnnnnnnnnnnnnnnnnnnnnnnnnnnnnnnnnnnnnnnnnnnnnnnnnnnnnnnnnnnnnnnnnnnnnnnnnnnnnnnnnnnnnnnnnnnnnnnnnnnnnnnnnnnnnnnnnnnnnnnnnnnnnnnnnnnnnnnnnnnnnnnnnnnnnnnnnnnnnnnnnnnnnnnnnnnnnnnnnnnnnnnnnnnnnnnnnnnnnnnnnnnnnnnnnnnnnnnnnnnnnnnnnnnnnnnnnnnnnnnnnnnnnnnnnnnnnnnnnnnnnnnnnnnnnnnnnnnnnnnnnnnnnnnnnnnnnnnnnnnnnnnnnnnnnnnnnnnnnnnnnnnnnnnnnnnnnnnnnnnnnnnnnnnnnnnnnnnnnnnnnnnnnnnnnnnnnnnnnnnnnnnnnnnnnnnnnnnnnnnnnnnnnnnnnnnnnnnnnnnnnnnnnnnnnnnnnnnnnnnnnnnnnnnnnnnnnnnnnnnnnnnnnnnnnnnnnnnnnnnnnnnnnnnnnnnnnnnnnnnnnnnnnnnnnnnnnnnnnnnnnnnnnnnnnnnnnnnnnnnnnnnnnnnnnnnnnnnnnnnnnnnnnnnnnnnnnnnnnnnnnnnnnnnnnnnnnnnnnnnnnnnnnnnnnnnnnnnnnnnnnnnnnnnnnnnnnnnnnnnnnnnnnnnnnnnnnnnnnnnnnnnnnnnnnnnnnnnnnnnnnnnnnnnnnnnnnnnnnnnnnnnnnnnnnnnnnnnnnnnnnnnnnnnnnnnnnnnnnnnnnnnnnnnnnnnnnnnnnnnnnnnnnnnnnnnnnnnnnnnnnnnnnnnnnnnnnnnnnnnnnnnnnnnnnnnnnnnnnnnnnnnnnnnnnnnnnnnnnnnnnnnnnnnnnnnnnnnnnnnnnnnnnnnnnnnnnnnnnnnnnnnnnnnnnnnnnnnnnnnnnnnnnnnnnnnnnnnnnnnnnnnnnnnnnnnnnnnnnnnnnnnnnnnnnnnnnnnnnnnnnnnnnnnnnnnnnnnnnnnnnnnnnnnnnnnnnnnnnnnnnnnnnnnnnnnnnnnnnnnnnnnnnnnnnnnnnnnnnnnnnnnnnnnnnnnnnnnnnnnnnnnnnnnnnnnnnnnnnnnnnnnnnnnnnnnnnnnnnnnnnnnnnnnnnnnnnnnnnnnnnnnnnnnnnnnnnnnnnnnnnnnnnnnnnnnnnnnnnnnnnnnnnnnnnnnnnnnnnnnnnnnnnnnnnnnnnnnnnnnnnnnnnnnnnnnnnnnnnnnnnnnnnnnnnnnnnnnnnnnnnnnnnnnnnnnnnnnnnnnnnnnnnnnnnnnnnnnnnnnnnnnnnnnnnnnnnnnnnnnnnnnnnnnnnnnnnnnnnnnnnnnnnnnnnnnnnnnnnnnnnnnnnnnnnnnnnnnnnnnnnnnnnnnnnnnnnnnnnnnnnnnnnnnnnnnnnnnnnnnnnnnnnnnnnnnnnnnnnnnnnnnnnnnnnnnnnnnnnnnnnnnnnnnnnnnnnnnnnnnnnnnnnnnnnnnnnnnnnnnnnnnnnnnnnnnnnnnnnnnnnnnnnnnnnnnnnnnnnnnnnnnnnnnnnnnnnnnnnnnnnnnnnnnnnnnnnnnnnnnnnnnnnnnnnnnnnnnnnnnnnnnnnnnnnnnnnnnnnnnnnnnnnnnnnnnnnnnnnnnnnnnnnnnnnnnnnnnnnnnnnnnnnnnnnnnnnnnnnnnnnnnnnnnnnnnnnnnnnnnnnnnnnnnnnnnnnnnnnnnnnnnnnnnnnnnnnnnnnnnnnnnnnnnnnnnnnnnnnnnnnnnnnnnnnnnnnnnnnnnnnnnnnnnnnnnnnnnnnnnnnnnnnnnnnnnnnnnnnnnnnnnnnnnnnnnnnnnnnnnnnnnnnnnnnnnnnnnnnnnnnnnnnnnnnnnnnnnnnnnnnnnnnnnnnnnnnnnnnnnnnnnnnnnnnnnnnnnnnnnnnnnnnnnnnnnnnnnnnnnnnnnnnnnnnnnnnnnnnnnnnnnnnnnnnnnnnnnnnnnnnnnnnnnnnnnnnnnnnnnnnnnnnnnnnnnnnnnnnnnnnnnnnnnnnnnnnnnnnnnnnnnnnnnnnnnnnnnnnnnnnnnnnnnnnnnnnnnnnnnnnnnnnnnnnnnnnnnnnnnnnnnnnnnnnnnnnnnnnnnnnnnnnnnnnnnnnnnnnnnnnnnnnnnnnnnnnnnnnnnnnnnnnnnnnnnnnnnnnnnnnnnnnnnnnnnnnnnnnnnnnnnnnnnnnnnnnnnnnnnnnnnnnnnnnnnnnnnnnnnnnnnnnnnnnnnnnnnnnnnnnnnnnnnnnnnnnnnnnnnnnnnnnnnnnnnnnnnnnnnnnnnnnnnnnnnnnnnnnnnnnnnnnnnnnnnnnnnnnnnnnnnnnnnnnnnnnnnnnnnnnnnnnnnnnnnnnnnnnnnnnnnnnnnnnnnnnnnnnnnnnnnnnnnnnnnnnnnnnnnnnnnnnnnnnnnnnnnnnnnnnnnnnnnnnnnnnnnnnnnnnnnnnnnnnnnnnnnnnnnnnnnnnnnnnnnnnnnnnnnnnnnnnnnnnnnnnnnnnnnnnnnnnnnnnnnnnnnnnnnnnnnnnnnnnnnnnnnnnnnnnnnnnnnnnnnnnnnnnnnnnnnnnnnnnnnnnnnnnnnnnnnnnnnnnnnnnnnnnnnnnnnnnnnnnnnnnnnnnnnnnnnnnnnnnnnnnnnnnnnnnnnnnnnnnnnnnnnnnnnnnnnnnnnnnnnnnnnnnnnnnnnnnnnnnnnnnnnnnnnnnnnnnnnnnnnnnnnnnnnnnnnnnnnnnnnnnnnnnnnnnnnnnnnnnnnnnnnnnnnnnnnnnnnnnnnnnnnnnnnnnnnnnnnnnnnnnnnnnnnnnnnnnnnnnnnnnnnnnnnnnnnnnnnnnnnnnnnnnnnnnnnnnnnnnnnnnnnnnnnnnnnnnnnnnnnnnnnnnnnnnnnnnnnnnnnnnnnnnnnnnnnnnnnnnnnnnnnnnnnnnnnnnnnnnnnnnnnnnnnnnnnnnnnnnnnnnnnnnnnnnnnnnnnnnnnnnnnnnnnnnnnnnnnnnnnnnnnnnnnnnnnnnnnnnnnnnnnnnnnnnnnnnnnnnnnnnnnnnnnnnnnnnnnnnnnnnnnnnnnnnnnnnnnnnnnnnnnnnnnnnnnnnnnnnnnnnnnnnnnnnnnnnnnnnnnnnnnnnnnnnnnnnnnnnnnnnnnnnnnnnnnnnnnnnnnnnnnnnnnnnnnnnnnnnnnnnnnnnnnnnnnnnnnnnnnnnnnnnnnnnnnnnnnnnnnnnnnnnnnnnnnnnnnnnnnnnnnnnnnnnnnnnnnnnnnnnnnnnnnnnnnnnnnnnnnnnnnnnnnnnnnnnnnnnnnnnnnnnnnnnnnnnnnnnnnnnnnnnnnnnnnnnnnnnnnnnnnnnnnnnnnnnnnnnnnnnnnnnnnnnnnnnnnnnnnnnnnnnnnnnnnnnnnnnnnnnnnnnnnnnnnnnnnnnnnnnnnnnnnnnnnnnnnnnnnnnnnnnnnnnnnnnnnnnnnnnnnnnnnnnnnnnnnnnnnnnnnnnnnnnnnnnnnnnnnnnnnnnnnnnnnnnnnnnnnnnnnnnnnnnnnnnnnnnnnnnnnnnnnnnnnnnnnnnnnnnnnnnnnnnnnnnnnnnnnnnnnnnnnnnnnnnnnnnnnnnnnnnnnnnnnnnnnnnnnnnnnnnnnnnnnnnnnnnnnnnnnnnnnnnnnnnnnnnnnnnnnnnnnnnnnnnnnnnnnnnnnnnnnnnnnnnnnnnnnnnnnnnnnnnnnnnnnnnnnnnnnnnnnnnnnnnnnnnnnnnnnnnnnnnnnnnnnnnnnnnnnnnnnnnnnnnnnnnnnnnnnnnnnnnnnnnnnnnnnnnnnnnnnnnnnnnnnnnnnnnnnnnnnnnnnnnnnnnnnnnnnnnnnnnnnnnnnnnnnnnnnnnnnnnnnnnnnnnnnnnnnnnnnnnnnnnnnnnnnnnnnnnnnnnnnnnnnnnnnnnnnnnnnnnnnnnnnnnnnnnnnnnnnnnnnnnnnnnnnnnnnnnnnnnnnnnnnnnnnnnnnnnnnnnnnnnnnnnnnnnnnnnnnnnnnnnnnnnnnnnnnnnnnnnnnnnnnnnnnnnnnnnnnnnnnnnnnnnnnnnnnnnnnnnnnnnnnnnnnnnnnnnnnnnnnnnnnnnnnnnnnnnnnnnnnnnnnnnnnnnnnnnnnnnnnnnnnnnnnnnnnnnnnnnnnnnnnnnnnnnnnnnnnnnnnnnnnnnnnnnnnnnnnnnnnnnnnnnnnnnnnnnnnnnnnnnnnnnnnnnnnnnnnnnnnnnnnnnnnnnnnnnnnnnnnnnnnnnnnnnnnnnnnnnnnnnnnnnnnnnnnnnnnnnnnnnnnnnnnnnnnnnnnnnnnnnnnnnnnnnnnnnnnnnnnnnnnnnnnnnnnnnnnnnnnnnnnnnnnnnnnnnnnnnnnnnnnnnnnnnnnnnnnnnnnnnnnnnnnnnnnnnnnnnnnnnnnnnnnnnnnnnnnnnnnnnnnnnnnnnnnnnnnnnnnnnnnnnnnnnnnnnnnnnnnnnnnnnnnnnnnnnnnnnnnnnnnnnnnnnnnnnnnnnnnnnnnnnnnnnnnnnnnnnnnnnnnnnnnnnnnnnnnnnnnnnnnnnnnnnnnnnnnnnnnnnnnnnnnnnnnnnnnnnnnnnnnnnnnnnnnnnnnnnnnnnnnnnnnnnnnnnnnnnnnnnnnnnnnnnnnnnnnnnnnnnnnnnnnnnnnnnnnnnnnnnnnnnnnnnnnnnnnnnnnnnnnnnnnnnnnnnnnnnnnnnnnnnnnnnnnnnnnnnnnnnnnnnnnnnnnnnnnnnnnnnnnnnnnnnnnnnnnnnnnnnnnnnnnnnnnnnnnnnnnnnnnnnnnnnnnnnnnnnnnnnnnnnnnnnnnnnnnnnnnnnnnnnnnnnnnnnnnnnnnnnnnnnnnnnnnnnnnnnnnnnnnnnnnnnnnnnnnnnnnnnnnnnnnnnnnnnnnnnnnnnnnnnnnnnnnnnnnnnnnnnnnnnnnnnnnnnnnnnnnnnnnnnnnnnnnnnnnnnnnnnnnnnnnnnnnnnnnnnnnnnnnnnnnnnnnnnnnnnnnnnnnnnnnnnnnnnnnnnnnnnnnnnnnnnnnnnnnnnnnnnnnnnnnnnnnnnnnnnnnnnnnnnnnnnnnnnnnnnnnnnnnnnnnnnnnnnnnnnnnnnnnnnnnnnnnnnnnnnnnnnnnnnnnnnnnnnnnnnnnnnnnnnnnnnnnnnnnnnnnnnnnnnnnnnnnnnnnnnnnnnnnnnnnnnnnnnnnnnnnnnnnnnnnnnnnnnnnnnnnnnnnnnnnnnnnnnnnnnnnnnnnnnnnnnnnnnnnnnnnnnnnnnnnnnnnnnnnnnnnnnnnnnnnnnnnnnnnnnnnnnnnnnnnnnnnnnnnnnnnnnnnnnnnnnnnnnnnnnnnnnnnnnnnnnnnnnnnnnnnnnnnnnnnnnnnnnnnnnnnnnnnnnnnnnnnnnnnnnnnnnnnnnnnnnnnnnnnnnnnnnnnnnnnnnnnnnnnnnnnnnnnnnnnnnnnnnnnnnnnnnnnnnnnnnnnnnnnnnnnnnnnnnnnnnnnnnnnnnnnnnnnnnnnnnnnnnnnnnnnnnnnnnnnnnnnnnnnnnnnnnnnnnnnnnnnnnnnnnnnnnnnnnnnnnnnnnnnnnnnnnnnnnnnnnnnnnnnnnnnnnnnnnnnnnnnnnnnnnnnnnnnnnnnnnnnnnnnnnnnnnnnnnnnnnnnnnnnnnnnnnnnnnnnnnnnnnnnnnnnnnnnnnnnnnnnnnnnnnnnnnnnnnnnnnnnnnnnnnnnnnnnnnnnnnnnnnnnnnnnnnnnnnnnnnnnnnnnnnnnnnnnnnnnnnnnnnnnnnnnnnnnnnnnnnnnnnnnnnnnnnnnnnnnnnnnnnnnnnnnnnnnnnnnnnnnnnnnnnnnnnnnnnnnnnnnnnnnnnnnnnnnnnnnnnnnnnnnnnnnnnnnnnnnnnnnnnnnnnnnnnnnnnnnnnnnnnnnnnnnnnnnnnnnnnnnnnnnnnnnnnnnnnnnnnnnnnnnnnnnnnnnnnnnnnnnnnnnnnnnnnnnnnnnnnnnnnnnnnnnnnnnnnnnnnnnnnnnnnnnnnnnnnnnnnnnnnnnnnnnnnnnnnnnnnnnnnnnnnnnnnnnnnnnnnnnnnnnnnnnnnnnnnnnnnnnnnnnnnnnnnnnnnnnnnnnnnnnnnnnnnnnnnnnnnnnnnnnnnnnnnnnnnnnnnnnnnnnnnnnnnnnnnnnnnnnnnnnnnnnnnnnnnnnnnnnnnnnnnnnnnnnnnnnnnnnnnnnnnnnnnnnnnnnnnnnnnnnnnnnnnnnnnnnnnnnnnnnnnnnnnnnnnnnnnnnnnnnnnnnnnnnnnnnnnnnnnnnnnnnnnnnnnnnnnnnnnnnnnnnnnnnnnnnnnnnnnnnnnnnnnnnnnnnnnnnnnnnnnnnnnnnnnnnnnnnnnnnnnnnnnnnnnnnnnnnnnnnnnnnnnnnnnnnnnnnnnnnnnnnnnnnnnnnnnnnnnnnnnnnnnnnnnnnnnnnnnnnnnnnnnnnnnnnnnnnnnnnnnnnnnnnnnnnnnnnnnnnnnnnnnnnnnnnnnnnnnnnnnnnnnnnnnnnnnnnnnnnnnnnnnnnnnnnnnnnnnnnnnnnnnnnnnnnnnnnnnnnnnnnnnnnnnnnnnnnnnnnnnnnnnnnnnnnnnnnnnnnnnnnnnnnnnnnnnnnnnnnnnnnnnnnnnnnnnnnnnnnnnnnnnnnnnnnnnnnnnnnnnnnnnnnnnnnnnnnnnnnnnnnnnnnnnnnnnnnnnnnnnnnnnnnnnnnnnnnnnnnnnnnnnnnnnnnnnnnnnnnnnnnnnnnnnnnnnnnnnnnnnnnnnnnnnnnnnnnnnnnnnnnnnnnnnnnnnnnnnnnnnnnnnnnnnnnnnnnnnnnnnnnnnnnnnnnnnnnnnnnnnnnnnnnnnnnnnnnnnnnnnnnnnnnnnnnnnnnnnnnnnnnnnnnnnnnnnnnnnnnnnnnnnnnnnnnnnnnnnnnnnnnnnnnnnnnnnnnnnnnnnnnnnnnnnnnnnnnnnnnnnnnnnnnnnnnnnnnnnnnnnnnnnnnnnnnnnnnnnnnnnnnnnnnnnnnnnnnnnnnnnnnnnnnnnnnnnnnnnnnnnnnnnnnnnnnnnnnnnnnnnnnnnnnnnnnnnnnnnnnnnnnnnnnnnnnnnnnnnnnnnnnnnnnnnnnnnnnnnnnnnnnnnnnnnnnnnnnnnnnnnnnnnnnnnnnnnnnnnnnnnnnnnnnnnnnnnnnnnnnnnnnnnnnnnnnnnnnnnnnnnnnnnnnnnnnnnnnnnnnnnnnnnnnnnnnnnnnnnnnnnnnnnnnnnnnnnnnnnnnnnnnnnnnnnnnnnnnnnnnnnnnnnnnnnnnnnnnnnnnnnnnnnnnnnnnnnnnnnnnnnnnnnnnnnnnnnnnnnnnnnnnnnnnnnnnnnnnnnnnnnnnnnnnnnnnnnnnnnnnnnnnnnnnnnnnnnnnnnnnnnnnnnnnnnnnnnnnnnnnnnnnnnnnnnnnnnnnnnnnnnnnnnnnnnnnnnnnnnnnnnnnnnnnnnnnnnnnnnnnnnnnnnnnnnnnnnnnnnnnnnnnnnnnnnnnnnnnnnnnnnnnnnnnnnnnnnnnnnnnnnnnnnnnnnnnnnnnnnnnnnnnnnnnnnnnnnnnnnnnnnnnnnnnnnnnnnnnnnnnnnnnnnnnnnnnnnnnnnnnnnnnnnnnnnnnnnnnnnnnnnnnnnnnnnnnnnnnnnnnnnnnnnnnnnnnnnnnnnnnnnnnnnnnnnnnnnnnnnnnnnnnnnnnnnnnnnnnnnnnnnnnnnnnnnnnnnnnnnnnnnnnnnnnnnnnnnnnnnnnnnnnnnnnnnnnnnnnnnnnnnnnnnnnnnnnnnnnnnnnnnnnnnnnnnnnnnnnnnnnnnnnnnnnnnnnnnnnnnnnnnnnnnnnnnnnnnnnnnnnnnnnnnnnnnnnnnnnnnnnnnnnnnnnnnnnnnnnnnnnnnnnnnnnnnnnnnnnnnnnnnnnnnnnnnnnnnnnnnnnnnnnnnnnnnnnnnnnnnnnnnnnnnnnnnnnnnnnnnnnnnnnnnnnnnnnnnnnnnnnnnnnnnnnnnnnnnnnnnnnnnnnnnnnnnnnnnnnnnnnnnnnnnnnnnnnnnnnnnnnnnnnnnnnnnnnnnnnnnnnnnnnnnnnnnnnnnnnnnnnnnnnnnnnnnnnnnnnnnnnnnnnnnnnnnnnnnnnnnnnnnnnnnnnnnnnnnnnnnnnnnnnnnnnnnnnnnnnnnnnnnnnnnnnnnnnnnnnnnnnnnnnnnnnnnnnnnnnnnnnnnnnnnnnnnnnnnnnnnnnnnnnnnnnnnnnnnnnnnnnnnnnnnnnnnnnnnnnnnnnnnnnnnnnnnnnnnnnnnnnnnnnnnnnnnnnnnnnnnnnnnnnnnnnnnnnnnnnnnnnnnnnnnnnnnnnnnnnnnnnnnnnnnnnnnnnnnnnnnnnnnnnnnnnnnnnnnnnnnnnnnnnnnnnnnnnnnnnnnnnnnnnnnnnnnnnnnnnnnnnnnnnnnnnnnnnnnnnnnnnnnnnnnnnnnnnnnnnnnnnnnnnnnnnnnnnnnnnnnnnnnnnnnnnnnnnnnnnnnnnnnnnnnnnnnnnnnnnnnnnnnnnnnnnnnnnnnnnnnnnnnnnnnnnnnnnnnnnnnnnnnnnnnnnnnnnnnnnnnnnnnnnnnnnnnnnnnnnnnnnnnnnnnnnnnnnnnnnnnnnnnnnnnnnnnnnnnnnnnnnnnnnnnnnnnnnnnnnnnnnnnnnnnnnnnnnnnnnnnnnnnnnnnnnnnnnnnnnnnnnnnnnnnnnnnnnnnnnnnnnnnnnnnnnnnnnnnnnnnnnnnnnnnnnnnnnnnnnnnnnnnnnnnnnnnnnnnnnnnnnnnnnnnnnnnnnnnnnnnnnnnnnnnnnnnnnnnnnnnnnnnnnnnnnnnnnnnnnnnnnnnnnnnnnnnnnnnnnnnnnnnnnnnnnnnnnnnnnnnnnnnnnnnnnnnnnnnnnnnnnnnnnnnnnnnnnnnnnnnnnnnnnnnnnnnnnnnnnnnnnnnnnnnnnnnnnnnnnnnnnnnnnnnnnnnnnnnnnnnnnnnnnnnnnnnnnnnnnnnnnnnnnnnnnnnnnnnnnnnnnnnnnnnnnnnnnnnnnnnnnnnnnnnnnnnnnnnnnnnnnnnnnnnnnnnnnnnnnnnnnnnnnnnnnnnnnnnnnnnnnnnnnnnnnnnnnnnnnnnnnnnnnnnnnnnnnnnnnnnnnnnnnnnnnnnnnnnnnnnnnnnnnnnnnnnnnnnnnnnnnnnnnnnnnnnnnnnnnnnnnnnnnnnnnnnnnnnnnnnnnnnnnnnnnnnnnnnnnnnnnnnnnnnnnnnnnnnnnnnnnnnnnnnnnnnnnnnnnnnnnnnnnnnnnnnnnnnnnnnnnnnnnnnnnnnnnnnnnnnnnnnnnnnnnnnnnnnnnnnnnnnnnnnnnnnnnnnnnnnnnnnnnnnnnnnnnnnnnnnnnnnnnnnnnnnnnnnnnnnnnnnnnnnnnnnnnnnnnnnnnnnnnnnnnnnnnnnnnnnnnnnnnnnnnnnnnnnnnnnnnnnnnnnnnnnnnnnnnnnnnnnnnnnnnnnnnnnnnnnnnnnnnnnnnnnnnnnnnnnnnnnnnnnnnnnnnnnnnnnnnnnnnnnnnnnnnnnnnnnnnnnnnnnnnnnnnnnnnnnnnnnnnnnnnnnnnnnnnnnnnnnnnnnnnnnnnnnnnnnnnnnnnnnnnnnnnnnnnnnnnnnnnnnnnnnnnnnnnnnnnnnnnnnnnnnnnnnnnnnnnnnnnnnnnnnnnnnnnnnnnnnnnnnnnnnnnnnnnnnnnnnnnnnnnnnnnnnnnnnnnnnnnnnnnnnnnnnnnnnnnnnnnnnnnnnnnnnnnnnnnnnnnnnnnnnnnnnnnnnnnnnnnnnnnnnnnnnnnnnnnnnnnnnnnnnnnnnnnnnnnnnnnnnnnnnnnnnnnnnnnnnnnnnnnnnnnnnnnnnnnnnnnnnnnnnnnnnnnnnnnnnnnnnnnnnnnnnnnnnnnnnnnnnnnnnnnnnnnnnnnnnnnnnnnnnnnnnnnnnnnnnnnnnnnnnnnnnnnnnnnnnnnnnnnnnnnnnnnnnnnnnnnnnnnnnnnnnnnnnnnnnnnnnnnnnnnnnnnnnnnnnnnnnnnnnnnnnnnnnnnnnnnnnnnnnnnnnnnnnnnnnnnnnnnnnnnnnnnnnnnnnnnnnnnnnnnnnnnnnnnnnnnnnnnnnnnnnnnnnnnnnnnnnnnnnnnnnnnnnnnnnnnnnnnnnnnnnnnnnnnnnnnnnnnnnnnnnnnnnnnnnnnnnnnnnnnnnnnnnnnnnnnnnnnnnnnnnnnnnnnnnnnnnnnnnnnnnnnnnnnnnnnnnnnnnnnnnnnnnnnnnnnnnnnnnnnnnnnnnnnnnnnnnnnnnnnnnnnnnnnnnnnnnnnnnnnnnnnnnnnnnnnnnnnnnnnnnnnnnnnnnnnnnnnnnnnnnnnnnnnnnnnnnnnnnnnnnnnnnnnnnnnnnnnnnnnnnnnnnnnnnnnnnnnnnnnnnnnnnnnnnnnnnnnnnnnnnnnnnnnnnnnnnnnnnnnnnnnnnnnnnnnnnnnnnnnnnnnnnnnnnnnnnnnnnnnnnnnnnnnnnnnnnnnnnnnnnnnnnnnnnnnnnnnnnnnnnnnnnnnnnnnnnnnnnnnnnnnnnnnnnnnnnnnnnnnnnnnnnnnnnnnnnnnnnnnnnnnnnnnnnnnnnnnnnnnnnnnnnnnnnnnnnnnnnnnnnnnnnnnnnnnnnnnnnnnnnnnnnnnnnnnnnnnnnnnnnnnnnnnnnnnnnnnnnnnnnnnnnnnnnnnnnnnnnnnnnnnnnnnnnnnnnnnnnnnnnnnnnnnnnnnnnnnnnnnnnnnnnnnnnnnnnnnnnnnnnnnnnnnnnnnnnnnnnnnnnnnnnnnnnnnnnnnnnnnnnnnnnnnnnnnnnnnnnnnnnnnnnnnnnnnnnnnnnnnnnnnnnnnnnnnnnnnnnnnnnnnnnnnnnnnnnnnnnnnnnnnnnnnnnnnnnnnnnnnnnnnnnnnnnnnnnnnnnnnnnnnnnnnnnnnnnnnnnnnnnnnnnnnnnnnnnnnnnnnnnnnnnnnnnnnnnnnnnnnnnnnnnnnnnnnnnnnnnnnnnnnnnnnnnnnnnnnnnnnnnnnnnnnnnnnnnnnnnnnnnnnnnnnnnnnnnnnnnnnnnnnnnnnnnnnnnnnnnnnnnnnnnnnnnnnnnnnnnnnnnnnnnnnnnnnnnnnnnnnnnnnnnnnnnnnnnnnnnnnnnnnnnnnnnnnnnnnnnnnnnnnnnnnnnnnnnnnnnnnnnnnnnnnnnnnnnnnnnnnnnnnnnnnnnnnnnnnnnnnnnnnnnnnnnnnnnnnnnnnnnnnnnnnnnnnnnnnnnnnnnnnnnnnnnnnnnnnnnnnnnnnnnnnnnnnnnnnnnnnnnnnnnnnnnnnnnnnnnnnnnnnnnnnnnnnnnnnnnnnnnnnnnnnnnnnnnnnnnnnnnnnnnnnnnnnnnnnnnnnnnnnnnnnnnnnnnnnnnnnnnnnnnnnnnnnnnnnnnnnnnnnnnnnnnnnnnnnnnnnnnnnnnnnnnnnnnnnnnnnnnnnnnnnnnnnnnnnnnnnnnnnnnnnnnnnnnnnnnnnnnnnnnnnnnnnnnnnnnnnnnnnnnnnnnnnnnnnnnnnnnnnnnnnnnnnnnnnnnnnnnnnnnnnnnnnnnnnnnnnnnnnnnnnnnnnnnnnnnnnnnnnnnnnnnnnnnnnnnnnnnnnnnnnnnnnnnnnnnnnnnnnnnnnnnnnnnnnnnnnnnnnnnnnnnnnnnnnnnnnnnnnnnnnnnnnnnnnnnnnnnnnnnnnnnnnnnnnnnnnnnnnnnnnnnnnnnnnnnnnnnnnnnnnnnnnnnnnnnnnnnnnnnnnnnnnnnnnnnnnnnnnnnnnnnnnnnnnnnnnnnnnnnnnnnnnnnnnnnnnnnnnnnnnnnnnnnnnnnnnnnnnnnnnnnnnnnnnnnnnnnnnnnnnnnnnnnnnnnnnnnnnnnnnnnnnnnnnnnnnnnnnnnnnnnnnnnnnnnnnnnnnnnnnnnnnnnnnnnnnnnnnnnnnnnnnnnnnnnnnnnnnnnnnnnnnnnnnnnnnnnnnnnnnnnnnnnnnnnnnnnnnnnnnnnnnnnnnnnnnnnnnnnnnnnnnnnnnnnnnnnnnnnnnnnnnnnnnnnnnnnnnnnnnnnnnnnnnnnnnnnnnnnnnnnnnnnnnnnnnnnnnnnnnnnnnnnnnnnnnnnnnnnnnnnnnnnnnnnnnnnnnnnnnnnnnnnnnnnnnnnnnnnnnnnnnnnnnnnnnnnnnnnnnnnnnnnnnnnnnnnnnnnnnnnnnnnnnnnnnnnnnnnnnnnnnnnnnnnnnnnnnnnnnnnnnnnnnnnnnnnnnnnnnnnnnnnnnnnnnnnnnnnnnnnnnnnnnnnnnnnnnnnnnnnnnnnnnnnnnnnnnnnnnnnnnnnnnnnnnnnnnnnnnnnnnnnnnnnnnnnnnnnnnnnnnnnnnnnnnnnnnnnnnnnnnnnnnnnnnnnnnnnnnnnnnnnnnnnnnnnnnnnnnnnnnnnnnnnnnnnnnnnnnnnnnnnnnnnnnnnnnnnnnnnnnnnnnnnnnnnnnnnnnnnnnnnnnnnnnnnnnnnnnnnnnnnnnnnnnnnnnnnnnnnnnnnnnnnnnnnnnnnnnnnnnnnnnnnnnnnnnnnnnnnnnnnnnnnnnnnnnnnnnnnnnnnnnnnnnnnnnnnnnnnnnnnnnnnnnnnnnnnnnnnnnnnnnnnnnnnnnnnnnnnnnnnnnnnnnnnnnnnnnnnnnnnnnnnnnnnnnnnnnnnnnnnnnnnnnnnnnnnnnnnnnnnnnnnnnnnnnnnnnnnnnnnnnnnnnnnnnnnnnnnnnnnnnnnnnnnnnnnnnnnnnnnnnnnnnnnnnnnnnnnnnnnnnnnnnnnnnnnnnnnnnnnnnnnnnnnnnnnnnnnnnnnnnnnnnnnnnnnnnnnnnnnnnnnnnnnnnnnnnnnnnnnnnnnnnnnnnnnnnnnnnnnnnnnnnnnnnnnnnnnnnnnnnnnnnnnnnnnnnnnnnnnnnnnnnnnnnnnnnnnnnnnnnnnnnnnnnnnnnnnnnnnnnnnnnnnnnnnnnnnnnnnnnnnnnnnnnnnnnnnnnnnnnnnnnnnnnnnnnnnnnnnnnnnnnnnnnnnnnnnnnnnnnnnnnnnnnnnnnnnnnnnnnnnnnnnnnnnnnnnnnnnnnnnnnnnnnnnnnnnnnnnnnnnnnnnnnnnnnnnnnnnnnnnnnnnnnnnnnnnnnnnnnnnnnnnnnnnnnnnnnnnnnnnnnnnnnnnnnnnnnnnnnnnnnnnnnnnnnnnnnnnnnnnnnnnnnnnnnnnnnnnnnnnnnnnnnnnnnnnnnnnnnnnnnnnnnnnnnnnnnnnnnnnnnnnnnnnnnnnnnnnnnnnnnnnnnnnnnnnnnnnnnnnnnnnnnnnnnnnnnnnnnnnnnnnnnnnnnnnnnnnnnnnnnnnnnnnnnnnnnnnnnnnnnnnnnnnnnnnnnnnnnnnnnnnnnnnnnnnnnnnnnnnnnnnnnnnnnnnnnnnnnnnnnnnnnnnnnnnnnnnnnnnnnnnnnnnnnnnnnnnnnnnnnnnnnnnnnnnnnnnnnnnnnnnnnnnnnnnnnnnnnnnnnnnnnnnnnnnnnnnnnnnnnnnnnnnnnnnnnnnnnnnnnnnnnnnnnnnnnnnnnnnnnnnnnnnnnnnnnnnnnnnnnnnnnnnnnnnnnnnnnnnnnnnnnnnnnnnnnnnnnnnnnnnnnnnnnnnnnnnnnnnnnnnnnnnnnnnnnnnnnnnnnnnnnnnnnnnnnnnnnnnnnnnnnnnnnnnnnnnnnnnnnnnnnnnnnnnnnnnnnnnnnnnnnnnnnnnnnnnnnnnnnnnnnnnnnnnnnnnnnnnnnnnnnnnnnnnnnnnnnnnnnnnnnnnnnnnnnnnnnnnnnnnnnnnnnnnnnnnnnnnnnnnnnnnnnnnnnnnnnnnnnnnnnnnnnnnnnnnnnnnnnnnnnnnnnnnnnnnnnnnnnnnnnnnnnnnnnnnnnnnnnnnnnnnnnnnnnnnnnnnnnnnnnnnnnnnnnnnnnnnnnnnnnnnnnnnnnnnnnnnnnnnnnnnnnnnnnnnnnnnnnnnnnnnnnnnnnnnnnnnnnnnnnnnnnnnnnnnnnnnnnnnnnnnnnnnnnnnnnnnnnnnnnnnnnnnnnnnnnnnnnnnnnnnnnnnnnnnnnnnnnnnnnnnnnnnnnnnnnnnnnnnnnnnnnnnnnnnnnnnnnnnnnnnnnnnnnnnnnnnnnnnnnnnnnnnnnnnnnnnnnnnnnnnnnnnnnnnnnnnnnnnnnnnnnnnnnnnnnnnnnnnnnnnnnnnnnnnnnnnnnnnnnnnnnnnnnnnnnnnnnnnnnnnnnnnnnnnnnnnnnnnnnnnnnnnnnnnnnnnnnnnnnnnnnnnnnnnnnnnnnnnnnnnnnnnnnnnnnnnnnnnnnnnnnnnnnnnnnnnnnnnnnnnnnnnnnnnnnnnnnnnnnnnnnnnnnnnnnnnnnnnnnnnnnnnnnnnnnnnnnnnnnnnnnnnnnnnnnnnnnnnnnnnnnnnnnnnnnnnnnnnnnnnnnnnnnnnnnnnnnnnnnnnnnnnnnnnnnnnnnnnnnnnnnnnnnnnnnnnnnnnnnnnnnnnnnnnnnnnnnnnnnnnnnnnnnnnnnnnnnnnnnnnnnnnnnnnnnnnnnnnnnnnnnnnnnnnnnnnnnnnnnnnnnnnnnnnnnnnnnnnnnnnnnnnnnnnnnnnnnnnnnnnnnnnnnnnnnnnnnnnnnnnnnnnnnnnnnnnnnnnnnnnnnnnnnnnnnnnnnnnnnnnnnnnnnnnnnnnnnnnnnnnnnnnnnnnnnnnnnnnnnnnnnnnnnnnnnnnnnnnnnnnnnnnnnnnnnnnnnnnnnnnnnnnnnnnnnnnnnnnnnnnnnnnnnnnnnnnnnnnnnnnnnnnnnnnnnnnnnnnnnnnnnnnnnnnnnnnnnnnnnnnnnnnnnnnnnnnnnnnnnnnnnnnnnnnnnnnnnnnnnnnnnnnnnnnnnnnnnnnnnnnnnnnnnnnnnnnnnnnnnnnnnnnnnnnnnnnnnnnnnnnnnnnnnnnnnnnnnnnnnnnnnnnnnnnnnnnnnnnnnnnnnnnnnnnnnnnnnnnnnnnnnnnnnnnnnnnnnnnnnnnnnnnnnnnnnnnnnnnnnnnnnnnnnnnnnnnnnnnnnnnnnnnnnnnnnnnnnnnnnnnnnnnnnnnnnnnnnnnnnnnnnnnnnnnnnnnnnnnnnnnnnnnnnnnnnnnnnnnnnnnnnnnnnnnnnnnnnnnnnnnnnnnnnnnnnnnnnnnnnnnnnnnnnnnnnnnnnnnnnnnnnnnnnnnnnnnnnnnnnnnnnnnnnnnnnnnnnnnnnnnnnnnnnnnnnnnnnnnnnnnnnnnnnnnnnnnnnnnnnnnnnnnnnnnnnnnnnnnnnnnnnnnnnnnnnnnnnnnnnnnnnnnnnnnnnnnnnnnnnnnnnnnnnnnnnnnnnnnnnnnnnnnnnnnnnnnnnnnnnnnnnnnnnnnnnnnnnnnnnnnnnnnnnnnnnnnnnnnnnnnnnnnnnnnnnnnnnnnnnnnnnnnnnnnnnnnnnnnnnnnnnnnnnnnnnnnnnnnnnnnnnnnnnnnnnnnnnnnnnnnnnnnnnnnnnnnnnnnnnnnnnnnnnnnnnnnnnnnnnnnnnnnnnnnnnnnnnnnnnnnnnnnnnnnnnnnnnnnnnnnnnnnnnnnnnnnnnnnnnnnnnnnnnnnnnnnnnnnnnnnnnnnnnnnnnnnnnnnnnnnnnnnnnnnnnnnnnnnnnnnnnnnnnnnnnnnnnnnnnnnnnnnnnnnnnnnnnnnnnnnnnnnnnnnnnnnnnnnnnnnnnnnnnnnnnnnnnnnnnnnnnnnnnnnnnnnnnnnnnnnnnnnnnnnnnnnnnnnnnnnnnnnnnnnnnnnnnnnnnnnnnnnnnnnnnnnnnnnnnnnnnnnnnnnnnnnnnnnnnnnnnnnnnnnnnnnnnnnnnnnnnnnnnnnnnnnnnnnnnnnnnnnnnnnnnnnnnnnnnnnnnnnnnnnnnnnnnnnnnnnnnnnnnnnnnnnnnnnnnnnnnnnnnnnnnnnnnnnnnnnnnnnnnnnnnnnnnnnnnnnnnnnnnnnnnnnnnnnnnnnnnnnnnnnnnnnnnnnnnnnnnnnnnnnnnnnnnnnnnnnnnnnnnnnnnnnnnnnnnnnnnnnnnnnnnnnnnnnnnnnnnnnnnnnnnnnnnnnnnnnnnnnnnnnnnnnnnnnnnnnnnnnnnnnnnnnnnnnnnnnnnnnnnnnnnnnnnnnnnnnnnnnnnnnnnnnnnnnnnnnnnnnnnnnnnnnnnnnnnnnnnnnnnnnnnnnnnnnnnnnnnnnnnnnnnnnnnnnnnnnnnnnnnnnnnnnnnnnnnnnnnnnnnnnnnnnnnnnnnnnnnnnnnnnnnnnnnnnnnnnnnnnnnnnnnnnnnnnnnnnnnnnnnnnnnnnnnnnnnnnnnnnnnnnnnnnnnnnnnnnnnnnnnnnnnnnnnnnnnnnnnnnnnnnnnnnnnnnnnnnnnnnnnnnnnnnnnnnnnnnnnnnnnnnnnnnnnnnnnnnnnnnnnnnnnnnnnnnnnnnnnnnnnnnnnnnnnnnnnnnnnnnnnnnnnnnnnnnnnnnnnnnnnnnnnnnnnnnnnnnnnnnnnnnnnnnnnnnnnnnnnnnnnnnnnnnnnnnnnnnnnnnnnnnnnnnnnnnnnnnnnnnnnnnnnnnnnnnnnnnnnnnnnnnnnnnnnnnnnnnnnnnnnnnnnnnnnnnnnnnnnnnnnnnnnnnnnnnnnnnnnnnnnnnnnnnnnnnnnnnnnnnnnnnnnnnnnnnnnnnnnnnnnnnnnnnnnnnnnnnnnnnnnnnnnnnnnnnnnnnnnnnnnnnnnnnnnnnnnnnnnnnnnnnnnnnnnnnnnnnnnnnnnnnnnnnnnnnnnnnnnnnnnnnnnnnnnnnnnnnnnnnnnnnnnnnnnnnnnnnnnnnnnnnnnnnnnnnnnnnnnnnnnnnnnnnnnnnnnnnnnnnnnnnnnnnnnnnnnnnnnnnnnnnnnnnnnnnnnnnnnnnnnnnnnnnnnnnnnnnnnnnnnnnnnnnnnnnnnnnnnnnnnnnnnnnnnnnnnnnnnnnnnnnnnnnnnnnnnnnnnnnnnnnnnnnnnnnnnnnnnnnnnnnnnnnnnnnnnnnnnnnnnnnnnnnnnnnnnnnnnnnnnnnnnnnnnnnnnnnnnnnnnnnnnnnnnnnnnnnnnnnnnnnnnnnnnnnnnnnnnnnnnnnnnnnnnnnnnnnnnnnnnnnnnnnnnnnnnnnnnnnnnnnnnnnnnnnnnnnnnnnnnnnnnnnnnnnnnnnnnnnnnnnnnnnnnnnnnnnnnnnnnnnnnnnnnnnnnnnnnnnnnnnnnnnnnnnnnnnnnnnnnnnnnnnnnnnnnnnnnnnnnnnnnnnnnnnnnnnnnnnnnnnnnnnnnnnnnnnnnnnnnnnnnnnnnnnnnnnnnnnnnnnnnnnnnnnnnnnnnnnnnnnnnnnnnnnnnnnnnnnnnnnnnnnnnnnnnnnnnnnnnnnnnnnnnnnnnnnnnnnnnnnnnnnnnnnnnnnnnnnnnnnnnnnnnnnnnnnnnnnnnnnnnnnnnnnnnnnnnnnnnnnnnnnnnnnnnnnnnnnnnnnnnnnnnnnnnnnnnnnnnnnnnnnnnnnnnnnnnnnnnnnnnnnnnnnnnnnnnnnnnnnnnnnnnnnnnnnnnnnnnnnnnnnnnnnnnnnnnnnnnnnnnnnnnnnnnnnnnnnnnnnnnnnnnnnnnnnnnnnnnnnnnnnnnnnnnnnnnnnnnnnnnnnnnnnnnnnnnnnnnnnnnnnnnnnnnnnnnnnnnnnnnnnnnnnnnnnnnnnnnnnnnnnnnnnnnnnnnnnnnnnnnnnnnnnnnnnnnnnnnnnnnnnnnnnnnnnnnnnnnnnnnnnnnnnnnnnnnnnnnnnnnnnnnnnnnnnnnnnnnnnnnnnnnnnnnnnnnnnnnnnnnnnnnnnnnnnnnnnnnnnnnnnnnnnnnnnnnnnnnnnnnnnnnnnnnnnnnnnnnnnnnnnnnnnnnnnnnnnnnnnnnnnnnnnnnnnnnnnnnnnnnnnnnnnnnnnnnnnnnnnnnnnnnnnnnnnnnnnnnnnnnnnnnnnnnnnnnnnnnnnnnnnnnnnnnnnnnnnnnnnnnnnnnnnnnnnnnnnnnnnnnnnnnnnnnnnnnnnnnnnnnnnnnnnnnnnnnnnnnnnnnnnnnnnnnnnnnnnnnnnnnnnnnnnnnnnnnnnnnnnnnnnnnnnnnnnnnnnnnnnnnnnnnnnnnnnnnnnnnnnnnnnnnnnnnnnnnnnnnnnnnnnnnnnnnnnnnnnnnnnnnnnnnnnnnnnnnnnnnnnnnnnnnnnnnnnnnnnnnnnnnnnnnnnnnnnnnnnnnnnnnnnnnnnnnnnnnnnnnnnnnnnnnnnnnnnnnnnnnnnnnnnnnnnnnnnnnnnnnnnnnnnnnnnnnnnnnnnnnnnnnnnnnnnnnnnnnnnnnnnnnnnnnnnnnnnnnnnnnnnnnnnnnnnnnnnnnnnnnnnnnnnnnnnnnnnnnnnnnnnnnnnnnnnnnnnnnnnnnnnnnnnnnnnnnnnnnnnnnnnnnnnnnnnnnnnnnnnnnnnnnnnnnnnnnnnnnnnnnnnnnnnnnnnnnnnnnnnnnnnnnnnnnnnnnnnnnnnnnnnnnnnnnnnnnnnnnnnnnnnnnnnnnnnnnnnnnnnnnnnnnnnnnnnnnnnnnnnnnnnnnnnnnnnnnnnnnnnnnnnnnnnnnnnnnnnnnnnnnnnnnnnnnnnnnnnnnnnnnnnnnnnnnnnnnnnnnnnnnnnnnnnnnnnnnnnnnnnnnnnnnnnnnnnnnnnnnnnnnnnnnnnnnnnnnnnnnnnnnnnnnnnnnnnnnnnnnnnnnnnnnnnnnnnnnnnnnnnnnnnnnnnnnnnnnnnnnnnnnnnnnnnnnnnnnnnnnnnnnnnnnnnnnnnnnnnnnnnnnnnnnnnnnnnnnnnnnnnnnnnnnnnnnnnnnnnnnnnnnnnnnnnnnnnnnnnnnnnnnnnnnnnnnnnnnnnnnnnnnnnnnnnnnnnnnnnnnnnnnnnnnnnnnnnnnnnnnnnnnnnnnnnnnnnnnnnnnnnnnnnnnnnnnnnnnnnnnnnnnnnnnnnnnnnnnnnnnnnnnnnnnnnnnnnnnnnnnnnnnnnnnnnnnnnnnnnnnnnnnnnnnnnnnnnnnnnnnnnnnnnnnnnnnnnnnnnnnnnnnnnnnnnnnnnnnnnnnnnnnnnnnnnnnnnnnnnnnnnnnnnnnnnnnnnnnnnnnnnnnnnnnnnnnnnnnnnnnnnnnnnnnnnnnnnnnnnnnnnnnnnnnnnnnnnnnnnnnnnnnnnnnnnnnnnnnnnnnnnnnnnnnnnnnnnnnnnnnnnnnnnnnnnnnnnnnnnnnnnnnnnnnnnnnnnnnnnnnnnnnnnnnnnnnnnnnnnnnnnnnnnnnnnnnnnnnnnnnnnnnnnnnnnnnnnnnnnnnnnnnnnnnnnnnnnnnnnnnnnnnnnnnnnnnnnnnnnnnnnnnnnnnnnnnnnnnnnnnnnnnnnnnnnnnnnnnnnnnnnnnnnnnnnnnnnnnnnnnnnnnnnnnnnnnnnnnnnnnnnnnnnnnnnnnnnnnnnnnnnnnnnnnnnnnnnnnnnnnnnnnnnnnnnnnnnnnnnnnnnnnnnnnnnnnnnnnnnnnnnnnnnnnnnnnnnnnnnnnnnnnnnnnnnnnnnnnnnnnnnnnnnnnnnnnnnnnnnnnnnnnnnnnnnnnnnnnnnnnnnnnnnnnnnnnnnnnnnnnnnnnnnnnnnnnnnnnnnnnnnnnnnnnnnnnnnnnnnnnnnnnnnnnnnnnnnnnnnnnnnnnnnnnnnnnnnnnnnnnnnnnnnnnnnnnnnnnnnnnnnnnnnnnnnnnnnnnnnnnnnnnnnnnnnnnnnnnnnnnnnnnnnnnnnnnnnnnnnnnnnnnnnnnnnnnnnnnnnnnnnnnnnnnnnnnnnnnnnnnnnnnnnnnnnnnnnnnnnnnnnnnnnnnnnnnnnnnnnnnnnnnnnnnnnnnnnnnnnnnnnnnnnnnnnnnnnnnnnnnnnnnnnnnnnnnnnnnnnnnnnnnnnnnnnnnnnnnnnnnnnnnnnnnnnnnnnnnnnnnnnnnnnnnnnnnnnnnnnnnnnnnnnnnnnnnnnnnnnnnnnnnnnnnnnnnnnnnnnnnnnnnnnnnnnnnnnnnnnnnnnnnnnnnnnnnnnnnnnnnnnnnnnnnnnnnnnnnnnnnnnnnnnnnnnnnnnnnnnnnnnnnnnnnnnnnnnnnnnnnnnnnnnnnnnnnnnnnnnnnnnnnnnnnnnnnnnnnnnnnnnnnnnnnnnnnnnnnnnnnnnnnnnnnnnnnnnnnnnnnnnnnnnnnnnnnnnnnnnnnnnnnnnnnnnnnnnnnnnnnnnnnnnnnnnnnnnnnnnnnnnnnnnnnnnnnnnnnnnnnnnnnnnnnnnnnnnnnnnnnnnnnnnnnnnnnnnnnnnnnnnnnnnnnnnnnnnnnnnnnnnnnnnnnnnnnnnnnnnnnnnnnnnnnnnnnnnnnnnnnnnnnnnnnnnnnnnnnnnnnnnnnnnnnnnnnnnnnnnnnnnnnnnnnnnnnnnnnnnnnnnnnnnnnnnnnnnnnnnnnnnnnnnnnnnnnnnnnnnnnnnnnnnnnnnnnnnnnnnnnnnnnnnnnnnnnnnnnnnnnnnnnnnnnnnnnnnnnnnnnnnnnnnnnnnnnnnnnnnnnnnnnnnnnnnnnnnnnnnnnnnnnnnnnnnnnnnnnnnnnnnnnnnnnnnnnnnnnnnnnnnnnnnnnnnnnnnnnnnnnnnnnnnnnnnnnnnnnnnnnnnnnnnnnnnnnnnnnnnnnnnnnnnnnnnnnnnnnnnnnnnnnnnnnnnnnnnnnnnnnnnnnnnnnnnnnnnnnnnnnnnnnnnnnnnnnnnnnnnnnnnnnnnnnnnnnnnnnnnnnnnnnnnnnnnnnnnnnnnnnnnnnnnnnnnnnnnnnnnnnnnnnnnnnnnnnnnnnnnnnnnnnnnnnnnnnnnnnnnnnnnnnnnnnnnnnnnnnnnnnnnnnnnnnnnnnnnnnnnnnnnnnnnnnnnnnnnnnnnnnnnnnnnnnnnnnnnnnnnnnnnnnnnnnnnnnnnnnnnnnnnnnnnnnnnnnnnnnnnnnnnnnnnnnnnnnnnnnnnnnnnnnnnnnnnnnnnnnnnnnnnnnnnnnnnnnnnnnnnnnnnnnnnnnnnnnnnnnnnnnnnnnnnnnnnnnnnnnnnnnnnnnnnnnnnnnnnnnnnnnnnnnnnnnnnnnnnnnnnnnnnnnnnnnnnnnnnnnnnnnnnnnnnnnnnnnnnnnnnnnnnnnnnnnnnnnnnnnnnnnnnnnnnnnnnnnnnnnnnnnnnnnnnnnnnnnnnnnnnnnnnnnnnnnnnnnnnnnnnnnnnnnnnnnnnnnnnnnnnnnnnnnnnnnnnnnnnnnnnnnnnnnnnnnnnnnnnnnnnnnnnnnnnnnnnnnnnnnnnnnnnnnnnnnnnnnnnnnnnnnnnnnnnnnnnnnnnnnnnnnnnnnnnnnnnnnnnnnnnnnnnnnnnnnnnnnnnnnnnnnnnnnnnnnnnnnnnnnnnnnnnnnnnnnnnnnnnnnnnnnnnnnnnnnnnnnnnnnnnnnnnnnnnnnnnnnnnnnnnnnnnnnnnnnnnnnnnnnnnnnnnnnnnnnnnnnnnnnnnnnnnnnnnnnnnnnnnnnnnnnnnnnnnnnnnnnnnnnnnnnnnnnnnnnnnnnnnnnnnnnnnnnnnnnnnnnnnnnnnnnnnnnnnnnnnnnnnnnnnnnnnnnnnnnnnnnnnnnnnnnnnnnnnnnnnnnnnnnnnnnnnnnnnnnnnnnnnnnnnnnnnnnnnnnnnnnnnnnnnnnnnnnnnnnnnnnnnnnnnnnnnnnnnnnnnnnnnnnnnnnnnnnnnnnnnnnnnnnnnnnnnnnnnnnnnnnnnnnnnnnnnnnnnnnnnnnnnnnnnnnnnnnnnnnnnnnnnnnnnnnnnnnnnnnnnnnnnnnnnnnnnnnnnnnnnnnnnnnnnnnnnnnnnnnnnnnnnnnnnnnnnnnnnnnnnnnnnnnnnnnnnnnnnnnnnnnnnnnnnnnnnnnnnnnnnnnnnnnnnnnnnnnnnnnnnnnnnnnnnnnnnnnnnnnnnnnnnnnnnnnnnnnnnnnnnnnnnnnnnnnnnnnnnnnnnnnnnnnnnnnnnnnnnnnnnnnnnnnnnnnnnnnnnnnnnnnnnnnnnnnnnnnnnnnnnnnnnnnnnnnnnnnnnnnnnnnnnnnnnnnnnnnnnnnnnnnnnnnnnnnnnnnnnnnnnnnnnnnnnnnnnnnnnnnnnnnnnnnnnnnnnnnnnnnnnnnnnnnnnnnnnnnnnnnnnnnnnnnnnnnnnnnnnnnnnnnnnnnnnnnnnnnnnnnnnnnnnnnnnnnnnnnnnnnnnnnnnnnnnnnnnnnnnnnnnnnnnnnnnnnnnnnnnnnnnnnnnnnnnnnnnnnnnnnnnnnnnnnnnnnnnnnnnnnnnnnnnnnnnnnnnnnnnnnnnnnnnnnnnnnnnnnnnnnnnnnnnnnnnnnnnnnnnnnnnnnnnnnnnnnnnnnnnnnnnnnnnnnnnnnnnnnnnnnnnnnnnnnnnnnnnnnnnnnnnnnnnnnnnnnnnnnnnnnnnnnnnnnnnnnnnnnnnnnnnnnnnnnnnnnnnnnnnnnnnnnnnnnnnnnnnnnnnnnnnnnnnnnnnnnnnnnnnnnnnnnnnnnnnnnnnnnnnnnnnnnnnnnnnnnnnnnnnnnnnnnnnnnnnnnnnnnnnnnnnnnnnnnnnnnnnnnnnnnnnnnnnnnnnnnnnnnnnnnnnnnnnnnnnnnnnnnnnnnnnnnnnnnnnnnnnnnnnnnnnnnnnnnnnnnnnnnnnnnnnnnnnnnnnnnnnnnnnnnnnnnnnnnnnnnnnnnnnnnnnnnnnnnnnnnnnnnnnnnnnnnnnnnnnnnnnnnnnnnnnnnnnnnnnnnnnnnnnnnnnnnnnnnnnnnnnnnnnnnnnnnnnnnnnnnnnnnnnnnnnnnnnnnnnnnnnnnnnnnnnnnnnnnnnnnnnnnnnnnnnnnnnnnnnnnnnnnnnnnnnnnnnnnnnnnnnnnnnnnnnnnnnnnnnnnnnnnnnnnnnnnnnnnnnnnnnnnnnnnnnnnnnnnnnnnnnnnnnnnnnnnnnnnnnnnnnnnnnnnnnnnnnnnnnnnnnnnnnnnnnnnnnnnnnnnnnnnnnnnnnnnnnnnnnnnnnnnnnnnnnnnnnnnnnnnnnnnnnnnnnnnnnnnnnnnnnnnnnnnnnnnnnnnnnnnnnnnnnnnnnnnnnnnnnnnnnnnnnnnnnnnnnnnnnnnnnnnnnnnnnnnnnnnnnnnnnnnnnnnnnnnnnnnnnnnnnnnnnnnnnnnnnnnnnnnnnnnnnnnnnnnnnnnnnnnnnnnnnnnnnnnnnnnnnnnnnnnnnnnnnnnnnnnnnnnnnnnnnnnnnnnnnnnnnnnnnnnnnnnnnnnnnnnnnnnnnnnnnnnnnnnnnnnnnnnnnnnnnnnnnnnnnnnnnnnnnnnnnnnnnnnnnnnnnnnnnnnnnnnnnnnnnnnnnnnnnnnnnnnnnnnnnnnnnnnnnnnnnnnnnnnnnnnnnnnnnnnnnnnnnnnnnnnnnnnnnnnnnnnnnnnnnnnnnnnnnnnnnnnnnnnnnnnnnnnnnnnnnnnnnnnnnnnnnnnnnnnnnnnnnnnnnnnnnnnnnnnnnnnnnnnnnnnnnnnnnnnnnnnnnnnnnnnnnnnnnnnnnnnnnnnnnnnnnnnnnnnnnnnnnnnnnnnnnnnnnnnnnnnnnnnnnnnnnnnnnnnnnnnnnnnnnnnnnnnnnnnnnnnnnnnnnnnnnnnnnnnnnnnnnnnnnnnnnnnnnnnnnnnnnnnnnnnnnnnnnnnnnnnnnnnnnnnnnnnnnnnnnnnnnnnnnnnnnnnnnnnnnnnnnnnnnnnnnnnnnnnnnnnnnnnnnnnnnnnnnnnnnnnnnnnnnnnnnnnnnnnnnnnnnnnnnnnnnnnnnnnnnnnnnnnnnnnnnnnnnnnnnnnnnnnnnnnnnnnnnnnnnnnnnnnnnnnnnnnnnnnnnnnnnnnnnnnnnnnnnnnnnnnnnnnnnnnnnnnnnnnnnnnnnnnnnnnnnnnnnnnnnnnnnnnnnnnnnnnnnnnnnnnnnnnnnnnnnnnnnnnnnnnnnnnnnnnnnnnnnnnnnnnnnnnnnnnnnnnnnnnnnnnnnnnnnnnnnnnnnnnnnnnnnnnnnnnnnnnnnnnnnnnnnnnnnnnnnnnnnnnnnnnnnnnnnnnnnnnnnnnnnnnnnnnnnnnnnnnnnnnnnnnnnnnnnnnnnnnnnnnnnnnnnnnnnnnnnnnnnnnnnnnnnnnnnnnnnnnnnnnnnnnnnnnnnnnnnnnnnnnnnnnnnnnnnnnnnnnnnnnnnnnnnnnnnnnnnnnnnnnnnnnnnnnnnnnnnnnnnnnnnnnnnnnnnnnnnnnnnnnnnnnnnnnnnnnnnnnnnnnnnnnnnnnnnnnnnnnnnnnnnnnnnnnnnnnnnnnnnnnnnnnnnnnnnnnnnnnnnnnnnnnnnnnnnnnnnnnnnnnnnnnnnnnnnnnnnnnnnnnnnnnnnnnnnnnnnnnnnnnnnnnnnnnnnnnnnnnnnnnnnnnnnnnnnnnnnnnnnnnnnnnnnnnnnnnnnnnnnnnnnnnnnnnnnnnnnnnnnnnnnnnnnnnnnnnnnnnnnnnnnnnnnnnnnnnnnnnnnnnnnnnnnnnnnnnnnnnnnnnnnnnnnnnnnnnnnnnnnnnnnnnnnnnnnnnnnnnnnnnnnnnnnnnnnnnnnnnnnnnnnnnnnnnnnnnnnnnnnnnnnnnnnnnnnnnnnnnnnnnnnnnnnnnnnnnnnnnnnnnnnnnnnnnnnnnnnnnnnnnnnnnnnnnnnnnnnnnnnnnnnnnnnnnnnnnnnnnnnnnnnnnnnnnnnnnnnnnnnnnnnnnnnnnnnnnnnnnnnnnnnnnnnnnnnnnnnnnnnnnnnnnnnnnnnnnnnnnnnnnnnnnnnnnnnnnnnnnnnnnnnnnnnnnnnnnnnnnnnnnnnnnnnnnnnnnnnnnnnnnnnnnnnnnnnnnnnnnnnnnnnnnnnnnnnnnnnnnnnnnnnnnnnnnnnnnnnnnnnnnnnnnnnnnnnnnnnnnnnnnnnnnnnnnnnnnnnnnnnnnnnnnnnnnnnnnnnnnnnnnnnnnnnnnnnnnnnnnnnnnnnnnnnnnnnnnnnnnnnnnnnnnnnnnnnnnnnnnnnnnnnnnnnnnnnnnnnnnnnnnnnnnnnnnnnnnnnnnnnnnnnnnnnnnnnnnnnnnnnnnnnnnnnnnnnnnnnnnnnnnnnnnnnnnnnnnnnnnnnnnnnnnnnnnnnnnnnnnnnnnnnnnnnnnnnnnnnnnnnnnnnnnnnnnnnnnnnnnnnnnnnnnnnnnnnnnnnnnnnnnnnnnnnnnnnnnnnnnnnnnnnnnnnnnnnnnnnnnnnnnnnnnnnnnnnnnnnnnnnnnnnnnnnnnnnnnnnnnnnnnnnnnnnnnnnnnnnnnnnnnnnnnnnnnnnnnnnnnnnnnnnnnnnnnnnnnnnnnnnnnnnnnnnnnnnnnnnnnnnnnnnnnnnnnnnnnnnnnnnnnnnnnnnnnnnnnnnnnnnnnnnnnnnnnnnnnnnnnnnnnnnnnnnnnnnnnnnnnnnnnnnnnnnnnnnnnnnnnnnnnnnnnnnnnnnnnnnnnnnnnnnnnnnnnnnnnnnnnnnnnnnnnnnnnnnnnnnnnnnnnnnnnnnnnnnnnnnnnnnnnnnnnnnnnnnnnnnnnnnnnnnnnnnnnnnnnnnnnnnnnnnnnnnnnnnnnnnnnnnnnnnnnnnnnnnnnnnnnnnnnnnnnnnnnnnnnnnnnnnnnnnnnnnnnnnnnnnnnnnnnnnnnnnnnnnnnnnnnnnnnnnnnnnnnnnnnnnnnnnnnnnnnnnnnnnnnnnnnnnnnnnnnnnnnnnnnnnnnnnnnnnnnnnnnnnnnnnnnnnnnnnnnnnnnnnnnnnnnnnnnnnnnnnnnnnnnnnnnnnnnnnnnnnnnnnnnnnnnnnnnnnnnnnnnnnnnnnnnnnnnnnnnnnnnnnnnnnnnnnnnnnnnnnnnnnnnnnnnnnnnnnnnnnnnnnnnnnnnnnnnnnnnnnnnnnnnnnnnnnnnnnnnnnnnnnnnnnnnnnnnnnnnnnnnnnnnnnnnnnnnnnnnnnnnnnnnnnnnnnnnnnnnnnnnnnnnnnnnnnnnnnnnnnnnnnnnnnnnnnnnnnnnnnnnnnnnnnnnnnnnnnnnnnnnnnnnnnnnnnnnnnnnnnnnnnnnnnnnnnnnnnnnnnnnnnnnnnnnnnnnnnnnnnnnnnnnnnnnnnnnnnnnnnnnnnnnnnnnnnnnnnnnnnnnnnnnnnnnnnnnnnnnnnnnnnnnnnnnnnnnnnnnnnnnnnnnnnnnnnnnnnnnnnnnnnnnnnnnnnnnnnnnnnnnnnnnnnnnnnnnnnnnnnnnnnnnnnnnnnnnnnnnnnnnnnnnnnnnnnnnnnnnnnnnnnnnnnnnnnnnnnnnnnnnnnnnnnnnnnnnnnnnnnnnnnnnnnnnnnnnnnnnnnnnnnnnnnnnnnnnnnnnnnnnnnnnnnnnnnnnnnnnnnnnnnnnnnnnnnnnnnnnnnnnnnnnnnnnnnnnnnnnnnnnnnnnnnnnnnnnnnnnnnnnnnnnnnnnnnnnnnnnnnnnnnnnnnnnnnnnnnnnnnnnnnnnnnnnnnnnnnnnnnnnnnnnnnnnnnnnnnnnnnnnnnnnnnnnnnnnnnnnnnnnnnnnnnnnnnnnnnnnnnnnnnnnnnnnnnnnnnnnnnnnnnnnnnnnnnnnnnnnnnnnnnnnnnnnnnnnnnnnnnnnnnnnnnnnnnnnnnnnnnnnnnnnnnnnnnnnnnnnnnnnnnnnnnnnnnnnnnnnnnnnnnnnnnnnnnnnnnnnnnnnnnnnnnnnnnnnnnnnnnnnnnnnnnnnnnnnnnnnnnnnnnnnnnnnnnnnnnnnnnnnnnnnnnnnnnnnnnnnnnnnnnnnnnnnnnnnnnnnnnnnnnnnnnnnnnnnnnnnnnnnnnnnnnnnnnnnnnnnnnnnnnnnnnnnnnnnnnnnnnnnnnnnnnnnnnnnnnnnnnnnnnnnnnnnnnnnnnnnnnnnnnnnnnnnnnnnnnnnnnnnnnnnnnnnnnnnnnnnnnnnnnnnnnnnnnnnnnnnnnnnnnnnnnnnnnnnnnnnnnnnnnnnnnnnnnnnnnnnnnnnnnnnnnnnnnnnnnnnnnnnnnnnnnnnnnnnnnnnnnnnnnnnnnnnnnnnnnnnnnnnnnnnnnnnnnnnnnnnnnnnnnnnnnnnnnnnnnnnnnnnnnnnnnnnnnnnnnnnnnnnnnnnnnnnnnnnnnnnnnnnnnnnnnnnnnnnnnnnnnnnnnnnnnnnnnnnnnnnnnnnnnnnnnnnnnnnnnnnnnnnnnnnnnnnnnnnnnnnnnnnnnnnnnnnnnnnnnnnnnnnnnnnnnnnnnnnnnnnnnnnnnnnnnnnnnnnnnnnnnnnnnnnnnnnnnnnnnnnnnnnnnnnnnnnnnnnnnnnnnnnnnnnnnnnnnnnnnnnnnnnnnnnnnnnnnnnnnnnnnnnnnnnnnnnnnnnnnnnnnnnnnnnnnnnnnnnnnnnnnnnnnnnnnnnnnnnnnnnnnnnnnnnnnnnnnnnnnnnnnnnnnnnnnnnnnnnnnnnnnnnnnnnnnnnnnnnnnnnnnnnnnnnnnnnnnnnnnnnnnnnnnnnnnnnnnnnnnnnnnnnnnnnnnnnnnnnnnnnnnnnnnnnnnnnnnnnnnnnnnnnnnnnnnnnnnnnnnnnnnnnnnnnnnnnnnnnnnnnnnnnnnnnnnnnnnnnnnnnnnnnnnnnnnnnnnnnnnnnnnnnnnnnnnnnnnnnnnnnnnnnnnnnnnnnnnnnnnnnnnnnnnnnnnnnnnnnnnnnnnnnnnnnnnnnnnnnnnnnnnnnnnnnnnnnnnnnnnnnnnnnnnnnnnnnnnnnnnnnnnnnnnnnnnnnnnnnnnnnnnnnnnnnnnnnnnnnnnnnnnnnnnnnnnnnnnnnnnnnnnnnnnnnnnnnnnnnnnnnnnnnnnnnnnnnnnnnnnnnnnnnnnnnnnnnnnnnnnnnnnnnnnnnnnnnnnnnnnnnnnnnnnnnnnnnnnnnnnnnnnnnnnnnnnnnnnnnnnnnnnnnnnnnnnnnnnnnnnnnnnnnnnnnnnnnnnnnnnnnnnnnnnnnnnnnnnnnnnnnnnnnnnnnnnnnnnnnnnnnnnnnnnnnnnnnnnnnnnnnnnnnnnnnnnnnnnnnnnnnnnnnnnnnnnnnnnnnnnnnnnnnnnnnnnnnnnnnnnnnnnnnnnnnnnnnnnnnnnnnnnnnnnnnnnnnnnnnnnnnnnnnnnnnnnnnnnnnnnnnnnnnnnnnnnnnnnnnnnnnnnnnnnnnnnnnnnnnnnnnnnnnnnnnnnnnnnnnnnnnnnnnnnnnnnnnnnnnnnnnnnnnnnnnnnnnnnnnnnnnnnnnnnnnnnnnnnnnnnnnnnnnnnnnnnnnnnnnnnnnnnnnnnnnnnnnnnnnnnnnnnnnnnnnnnnnnnnnnnnnnnnnnnnnnnnnnnnnnnnnnnnnnnnnnnnnnnnnnnnnnnnnnnnnnnnnnnnnnnnnnnnnnnnnnnnnnnnnnnnnnnnnnnnnnnnnnnnnnnnnnnnnnnnnnnnnnnnnnnnnnnnnnnnnnnnnnnnnnnnnnnnnnnnnnnnnnnnnnnnnnnnnnnnnnnnnnnnnnnnnnnnnnnnnnnnnnnnnnnnnnnnnnnnnnnnnnnnnnnnnnnnnnnnnnnnnnnnnnnnnnnnnnnnnnnnnnnnnnnnnnnnnnnnnnnnnnnnnnnnnnnnnnnnnnnnnnnnnnnnnnnnnnnnnnnnnnnnnnnnnnnnnnnnnnnnnnnnnnnnnnnnnnnnnnnnnnnnnnnnnnnnnnnnnnnnnnnnnnnnnnnnnnnnnnnnnnnnnnnnnnnnnnnnnnnnnnnnnnnnnnnnnnnnnnnnnnnnnnnnnnnnnnnnnnnnnnnnnnnnnnnnnnnnnnnnnnnnnnnnnnnnnnnnnnnnnnnnnnnnnnnnnnnnnnnnnnnnnnnnnnnnnnnnnnnnnnnnnnnnnnnnnnnnnnnnnnnnnnnnnnnnnnnnnnnnnnnnnnnnnnnnnnnnnnnnnnnnnnnnnnnnnnnnnnnnnnnnnnnnnnnnnnnnnnnnnnnnnnnnnnnnnnnnnnnnnnnnnnnnnnnnnnnnnnnnnnnnnnnnnnnnnnnnnnnnnnnnnnnnnnnnnnnnnnnnnnnnnnnnnnnnnnnnnnnnnnnnnnnnnnnnnnnnnnnnnnnnnnnnnnnnnnnnnnnnnnnnnnnnnnnnnnnnnnnnnnnnnnnnnnnnnnnnnnnnnnnnnnnnnnnnnnnnnnnnnnnnnnnnnnnnnnnnnnnnnnnnnnnnnnnnnnnnnnnnnnnnnnnnnnnnnnnnnnnnnnnnnnnnnnnnnnnnnnnnnnnnnnnnnnnnnnnnnnnnnnnnnnnnnnnnnnnnnnnnnnnnnnnnnnnnnnnnnnnnnnnnnnnnnnnnnnnnnnnnnnnnnnnnnnnnnnnnnnnnnnnnnnnnnnnnnnnnnnnnnnnnnnnnnnnnnnnnnnnnnnnnnnnnnnnnnnnnnnnnnnnnnnnnnnnnnnnnnnnnnnnnnnnnnnnnnnnnnnnnnnnnnnnnnnnnnnnnnnnnnnnnnnnnnnnnnnnnnnnnnnnnnnnnnnnnnnnnnnnnnnnnnnnnnnnnnnnnnnnnnnnnnnnnnnnnnnnnnnnnnnnnnnnnnnnnnnnnnnnnnnnnnnnnnnnnnnnnnnnnnnnnnnnnnnnnnnnnnnnnnnnnnnnnnnnnnnnnnnnnnnnnnnnnnnnnnnnnnnnnnnnnnnnnnnnnnnnnnnnnnnnnnnnnnnnnnnnnnnnnnnnnnnnnnnnnnnnnnnnnnnnnnnnnnnnnnnnnnnnnnnnnnnnnnnnnnnnnnnnnnnnnnnnnnnnnnnnnnnnnnnnnnnnnnnnnnnnnnnnnnnnnnnnnnnnnnnnnnnnnnnnnnnnnnnnnnnnnnnnnnnnnnnnnnnnnnnnnnnnnnnnnnnnnnnnnnnnnnnnnnnnnnnnnnnnnnnnnnnnnnnnnnnnnnnnnnnnnnnnnnnnnnnnnnnnnnnnnnnnnnnnnnnnnnnnnnnnnnnnnnnnnnnnnnnnnnnnnnnnnnnnnnnnnnnnnnnnnnnnnnnnnnnnnnnnnnnnnnnnnnnnnnnnnnnnnnnnnnnnnnnnnnnnnnnnnnnnnnnnnnnnnnnnnnnnnnnnnnnnnnnnnnnnnnnnnnnnnnnnnnnnnnnnnnnnnnnnnnnnnnnnnnnnnnnnnnnnnnnnnnnnnnnnnnnnnnnnnnnnnnnnnnnnnnnnnnnnnnnnnnnnnnnnnnnnnnnnnnnnnnnnnnnnnnnnnnnnnnnnnnnnnnnnnnnnnnnnnnnnnnnnnnnnnnnnnnnnnnnnnnnnnnnnnnnnnnnnnnnnnnnnnnnnnnnnnnnnnnnnnnnnnnnnnnnnnnnnnnnnnnnnnnnnnnnnnnnnnnnnnnnnnnnnnnnnnnnnnnnnnnnnnnnnnnnnnnnnnnnnnnnnnnnnnnnnnnnnnnnnnnnnnnnnnnnnnnnnnnnnnnnnnnnnnnnnnnnnnnnnnnnnnnnnnnnnnnnnnnnnnnnnnnnnnnnnnnnnnnnnnnnnnnnnnnnnnnnnnnnnnnnnnnnnnnnnnnnnnnnnnnnnnnnnnnnnnnnnnnnnnnnnnnnnnnnnnnnnnnnnnnnnnnnnnnnnnnnnnnnnnnnnnnnnnnnnnnnnnnnnnnnnnnnnnnnnnnnnnnnnnnnnnnnnnnnnnnnnnnnnnnnnnnnnnnnnnnnnnnnnnnnnnnnnnnnnnnnnnnnnnnnnnnnnnnnnnnnnnnnnnnnnnnnnnnnnnnnnnnnnnnnnnnnnnnnnnnnnnnnnnnnnnnnnnnnnnnnnnnnnnnnnnnnnnnnnnnnnnnnnnnnnnnnnnnnnnnnnnnnnnnnnnnnnnnnnnnnnnnnnnnnnnnnnnnnnnnnnnnnnnnnnnnnnnnnnnnnnnnnnnnnnnnnnnnnnnnnnnnnnnnnnnnnnnnnnnnnnnnnnnnnnnnnnnnnnnnnnnnnnnnnnnnnnnnnnnnnnnnnnnnnnnnnnnnnnnnnnnnnnnnnnnnnnnnnnnnnnnnnnnnnnnnnnnnnnnnnnnnnnnnnnnnnnnnnnnnnnnnnnnnnnnnnnnnnnnnnnnnnnnnnnnnnnnnnnnnnnnnnnnnnnnnnnnnnnnnnnnnnnnnnnnnnnnnnnnnnnnnnnnnnnnnnnnnnnnnnnnnnnnnnnnnnnnnnnnnnnnnnnnnnnnnnnnnnnnnnnnnnnnnnnnnnnnnnnnnnnnnnnnnnnnnnnnnnnnnnnnnnnnnnnnnnnnnnnnnnnnnnnnnnnnnnnnnnnnnnnnnnnnnnnnnnnnnnnnnnnnnnnnnnnnnnnnnnnnnnnnnnnnnnnnnnnnnnnnnnnnnnnnnnnnnnnnnnnnnnnnnnnnnnnnnnnnnnnnnnnnnnnnnnnnnnnnnnnnnnnnnnnnnnnnnnnnnnnnnnnnnnnnnnnnnnnnnnnnnnnnnnnnnnnnnnnnnnnnnnnnnnnnnnnnnnnnnnnnnnnnnnnnnnnnnnnnnnnnnnnnnnnnnnnnnnnnnnnnnnnnnnnnnnnnnnnnnnnnnnnnnnnnnnnnnnnnnnnnnnnnnnnnnnnnnnnnnnnnnnnnnnnnnnnnnnnnnnnnnnnnnnnnnnnnnnnnnnnnnnnnnnnnnnnnnnnnnnnnnnnnnnnnnnnnnnnnnnnnnnnnnnnnnnnnnnnnnnnnnnnnnnnnnnnnnnnnnnnnnnnnnnnnnnnnnnnnnnnnnnnnnnnnnnnnnnnnnnnnnnnnnnnnnnnnnnnnnnnnnnnnnnnnnnnnnnnnnnnnnnnnnnnnnnnnnnnnnnnnnnnnnnnnnnnnnnnnnnnnnnnnnnnnnnnnnnnnnnnnnnnnnnnnnnnnnnnnnnnnnnnnnnnnnnnnnnnnnnnnnnnnnnnnnnnnnnnnnnnnnnnnnnnnnnnnnnnnnnnnnnnnnnnnnnnnnnnnnnnnnnnnnnnnnnnnnnnnnnnnnnnnnnnnnnnnnnnnnnnnnnnnnnnnnnnnnnnnnnnnnnnnnnnnnnnnnnnnnnnnnnnnnnnnnnnnnnnnnnnnnnnnnnnnnnnnnnnnnnnnnnnnnnnnnnnnnnnnnnnnnnnnnnnnnnnnnnnnnnnnnnnnnnnnnnnnnnnnnnnnnnnnnnnnnnnnnnnnnnnnnnnnnnnnnnnnnnnnnnnnnnnnnnnnnnnnnnnnnnnnnnnnnnnnnnnnnnnnnnnnnnnnnnnnnnnnnnnnnnnnnnnnnnnnnnnnnnnnnnnnnnnnnnnnnnnnnnnnnnnnnnnnnnnnnnnnnnnnnnnnnnnnnnnnnnnnnnnnnnnnnnnnnnnnnnnnnnnnnnnnnnnnnnnnnnnnnnnnnnnnnnnnnnnnnnnnnnnnnnnnnnnnnnnnnnnnnnnnnnnnnnnnnnnnnnnnnnnnnncgcctggtagtaaaaggatatgctcagagacatgggatcgactacagtgaagtttttgcacctgtggctcgttgggacaccataaggctaatcttagctttagcagcacagaaaggatggactgttttccagctagacgtcaagagtgcatttcttcatggggaattagaggaagctgtctatgtggagcagccagaaggctatgttagcaaaggagaagagcataaagtgttgaaacttaaaaaagctctttacggcttgaaacaggctccaagagcctggtatagtagaattgaagggttcttcatgaaggaaggctttgagaaatgcagtcatgaacacacactgtttcttaaacatacaaatggaggtaaatgcttaattattagcctttatgtagacgatttaatttatacaggaaatgatgtggagctatgtgagaaattcaaggaatcaatgaaactagaatttgatatgagtgatttggggaaaatgaagtatttcttaggagtagaggttcaacagagctgtgaaggaatacatttatgtcaaatgaagtatgctggggaaattttagaaagatttggaatgggaggctgcaatccagtaaaaaatcctatcgtgccaggcacgaaattaataaaagatggtggagaagacagtgagaattcaaccttgtttaagcaaataattggcagcttaatgtatctatcagttaccagacctgacatagcgtttgttgtctgcatgttaagcaaattcatgactgatcctaaaacatcacatatggcagcagcaaaaagggttctcaggtatgtgaagggaactaccagcttaggagtgttttatagaagaagtgcagagaattctgaagatgatctcaaagtctacactgacagtgactatgccggcgatgtagaggatagaagaagcacgtctggttatgttttttttctaagtgaaggtgcagttgcatggagctcaagaaagcaaccagtggtgactctctccacaacagaagcagagtatgtagctgctgctgcatgtgcatgtcatagtatttggatgaaaagagtgctcaacagtcttggtttctcttcctgcaagtgtgttaagattttttgcgacaacagttccactataaagttatcaaaaaatccaattctccatggaagaacaaaacacatagacgtgaaatttcattttttacgtgatctggtaaaggaaggtgctgtagaattaattcattgtgggactcgtgagcaagtggcagacatcttgacaaaacctttgaagttggaatcatttacaaggctacgtgatctgttgggaatgcagagcatcaaaactataaactgacttgttagcaagtgcagtttaggggaggatatgttggaaaccagttgttttcgttagaataaagctcctgtcttttaggagccagtaagttagtttgttagtgcaagtcagtatagtttgttagtgctgactatgactaagtcattgttttgtaatttttctgttgttctgttaccacaatcttcggctaagaagatgtggtttgtttttccctgattccaagttgtaatggttatttaagccaaaggaacactactgaataaagtgtattttcacagttaaattgtgcaagatctttgatattataacagattcaacaccacttcttctctctcgaccggacccttccaatgagtcaaaacaacctccctcccttgatgaaaccattgaacgttgtattggagagtttgggctcgcccaactcctccaagccatccttgtgtcatttgcatgggtgtttgatgcacaacaaacattcattagtgttttcactgatgctgagccaaaatggcactgcacaagtgattcatgtacttcagtctccgacatttgccatcttcctcaaaattcatgggcttgggatagccctaaggacacatcaatcatatcagaatggggacttgagtgtgctagttcaataatcaaaggcctacccgcatcttcatttttcatggggtgcctcattggaggactgatgctagccacgcttgctgattccttgcttggtcgcaagaatttgctgtttctatcatgcctaatgatgtctttctctggattattcactgtcttctccaacaacatatggatctactcggccttgaaattcgttaatggtgtcggccgtgcaacaattggaacatgcgcccttgtgttatcaactgagcttgtagggaaacgttggcgaagccaggtaggagttattggtttcttttgtttcacgctagggtttttaacattacccgcttttgcatatatgaatagaggttcctcttggagaactctttatctatggacttcagtaccaacaattttctactccatattagttcatttcttagttcgagagtctccaagatggctttttgttcgcggacgtaaagaagaagccgtgactatactgaagagtattgctacggctgggagtagtggcatactcatgagcttctcaaatttggaattcgggaaagagtcatggaatgttgatacttattcagcaatcaagattctcttaaagaaaaagtgggcttgcagaagactgttgacagtcatggcagtggtattcggtattggaatggtgtattacggcatgccattaggcctcggaaatttgtcattcaatctctacttgagtgtcacatttaatgccttgtcagagctacctgcctcattagtgacattcttcctcgtagacaaactaaaccgaaaggattcgctgcttgttttcaccactctaagtggggtttgtagcatcctttcagttgtgatgggcgagacatctgcaaatctacaaatggggctggagctggtatcttttttctgcgcatgtacagcattcaacatttcattgatccacacactagagttattccctacatgtgtgaggaattcggcaatatcaatggctagacaatctcttgtattcgggggtatgttcagtccggtgctggtggcggttggaagtaagaacaggtttctgtcatacgggatatttgggatggtaatagggatttgtgggttgtttgtgatattcttgccggagacaaggggcaggacaatttgtgacaccatggatgaggaagagtacaacagtacaaacaatgatctgcctgtgttggggtgactcacatctagaactaaaattgattttcgtgttggctggctggtgtagtaactagtagtagctagaatcattttgttttgaaaagataaatatagtggtatcttgcataatcaaattaagttgttggctttgcaagtggccactggtgaaatgatattttgtgcattgcagacggacttgtaatgaagtttgtcttcctctgagaagattccgcgtgtgtaacttcattttgttcgtcgacaagcaaattaatagacggcgtggaatgattttttttcatgtatatatggaataatgtatggagacatgaacaaaacttttggctgctagtaattatagaaattttgtctttttcaaaaaagagtaaattaagttaattaattaatacactaatattgccggcttgcttgttttttggaacaaaaaattgcttatagatgttttaaagcttatcttctcgacgggcagccgccacatggccataaaaacgacaccgcgactttgtctctcttatctgtttgcttagtcatccactcgaccagtaacaaaaactagaaaatatcttacgtttggagtgaagtgcagggtcctcattcgagccctgtttgtttctgtgtttcaaaaacgtttttgacaaaatttgaaaattttttatttttttattaacttgaaattaatatgtttttagtgttttcaaatcattttgatgtgctgatgtcaaaaataatttttaaaaaataaaaaaacatcattggcatgcattttggcacgaaaagctatttgaaaagcaaccgcaaccgcaaccacactgtcaaacaaaccctcaatagcgatatttatgtttttatgtatttaaaaataatcaaaaaaaatttaaaaaaatattattttgatatattttttatacttcaattacttataaatgatttttggtgcttgttaacgtaatctaactatattttttaaaaattaattttttattttaaattaattttttaatgttattttttaattttaatttgttgatattaaaaataaattttaaacaaaatagatgttaaataagtggagaatgaggtgtcaaccactaaccctaggccaatgcattcaagatgtaggtccacttggagtgaacagtgcccaattgaattatattcacttggttgcagacgtgagagttgcttctcacgaaacggtatttcttcaaaaatatatatggattccacatgaaaagctagttaaatttttatattatcaaatttgatatttatacggtgagttttaaaagcaaaagttaccgtgtaaacaaatacctacacctggctctattgaaccgttatttaatcttcaatgggcttgctcctaagtccgaaactaatttgtcatggaattgggggcaggggtacgtgggcttccgtattcacatttaaaccaacgcggattaaaggggtttttttttgttttaaaagaataataataattgttttttaaaatattttttatttataaataaattaaaataatattttttatttttaaaataatttgcttttgaagaaaaactcctagctagataaaaaaaaaaaaagagagccaaaagccgtagcttttccaaagggtctgatcaacctgcttgcaacgacaaatacaaataatttcagtaactcttcgattttatttctatgattgttatggttgaagccccgagtcttccatgtccaagagatagccaggttttataattaataagatagtaagtagtgatgggatattttttttataattaaaatcgaattacgtttttgtaatagttgttttatgttggagttttgataaaaatagatttaaaaaaattatttttaattgtgattgatttgatttaaatagattttttgtttaaaatgtatttgaaaacattgttatgtgaataacatattaaaattttttggttaaaactatgatctaaataacttaaattattaaaaaaaataatttacacaataatcatatataatacattggaataataataaaaataaaaaaagacattgaagaataaaaaatagttttcttgcagcagtggcgcttgtcatcataaatagagatttctctaaaaagactatatattgagaaaaatattacttattttaccagaatcttggctcagtaatgtgttcttacaataaaatttcaagaaaaactaagatagtagctgatgatttctttttcaaaaaacagtgaatgaacaaacagaaaattggtcctacctctgcaaatctctctcccactccttcatttaccattgaatgctgatcttacatgcactgtacatcattttcgatattaaaacctctcaactcttttcaaacgtttaattctaaaaattaagaactacgtacaatgatatttgtgtttgtgtgtgattgttacgtgccaagctggctccatgcatgaatgcacgatatttgatttagtcttgatgatcgaaatcttatacaagtcgtaaaagcaaatcagtcaagtcattgaagactaacgtgcttagttttctttgaagtatagaggaggttgatctttgaagtggaatctgctttgcccacagcaacacttcatttgcaaagctttatcgatcacaagggttgaaaagctgttatttttgcctataaactactacgcagcctattcgtcagcactcgatcgacaatatattcctgaatttaatactatttttctgtctgattaaacagtagataagttgctttcaaggttctagacctcagttcatgcacatcgttgttaagtttatttcatcaatcaactgcgaaagcaaaggattatatatattaaaaaagagtaatgatcatggccaagaaaaccataaaacagcattcttgctggtgttatttgcttggaaaaattactaatcattgttacaagaaaagcattaattaatttttagaaaattagtaaggccatgtcacgaataatcaatgcttactaattaaagtttccaggacagcatatttcttcagtcaataaattacttgaaacaatcaagccacctctaattagtgacgttattagtaatttctatcaagataattaataatgtaaaagataaacttgcaaaccaactaggctaatcccttagaaattcaattgtatagggattgatcataacacgctataataatatttttttatgaattaatgcactataattattttatgatttttttaaggttaaaaagtgtttataatttggaaaatagctgggtgacacagcaaagagagcatttttagggcccggaggaagtgaagagcagggacggagccaggttattaggttaggagggggggggggattataaaaaaaaaatatagggggctaaaatttaaaatttattttcaagtggtaatctaaacaatacaaaaaatacaacaacaataaataaattattaaagaaaaacacaaaaaaacaaaaaaaaatacgcctaagactatttgaatgatcaaataaccaagtactgatctaataaaagacaaacctaaaaaaacaaagaaaaactcagaagaagaagaagaacacacaagctttaattaaaaaagaaaaaaaaagcaagtttaggtgaacctcttaaacctagtctaaattatataatttgcaattcgttaaatcctaaacctaatttcaattaagaaatttaactctcaatcaatttaattttaaatgatgaaatcgttaaaaaatattaataaaaaaacttgcaaaagcacaaagaagtgagaaataaaatgaaaataaaatttgagagaaaaacctaaatatgatgaaatttgaaaaaaaaaaacaattcaaataaaataaatagaaattaaaataataaaaaataaaatttaaaagattaaaaaatcacagggaggtaaaattaaaaaaacatatgtaatataatagattatttatagattaaaaaataatagaagtgaagtcgaaaaaaatatagagggttgacccaataaaattaaatagcaaaaaataaaaaaatattagcttaattttttttattataaaaaataaaataatttatttttttatttataaaaacctttttttcattttttatatatatatatataaaagtccatctcacagtaattttagacaaaaatatttctttacttttaaaaaataacgtaatcattgtagctacacaatgccaataacaacgcttagtcttattgtaagaacctactcaaccaatatagattgggcagagataatgttggcccaggaaaagcaaatcataagaaaaggtcgcttcttcttgaaaacacatgttttcttcatttttgggctcaatgaactgtaacgaaatgatggaagagcaattgacaccaacgcactcaattagacctagtgctcatgagtgcacctcaagtttaaattccaccacatttccgatttgtctgcttttagggtttttgttgaattcttcttcgtatatttagatgcaagacatgatgatgaataaaattaggcaacgacaatccacgtcattagaaacgtaaactgaacactcaaggacgccttctgctgctttgcctcctgactattctaattaattagaggaataggcccgctggttagtgcagggatcttcgcgcaattcaattcaatattatatattaagaaaataccagaactatatatgggtaaatcgaaaaataaacttaaatttataatagaaaacaattttaatataaaaaaatcaactaaccaattattgagtcaccataattaactcatctgacccaacaaagtcttaatactaggaaatggaccgcttgatcaatctcccagaaagttaacacaacaaaatgcattactgccctccatacacaatgttttgccacctggcctgtattgctcggaaattcatgcacttgccagtcactgtattttcttcccctccaccttaattcctctgggtcgggtagatgtgaggacatgtcgtgcccgactcaaaaaacccagcgtgctggcacatactagtagtaggcgaacatatcggatataaattgagatctttcaggtgagaggagtgatgggattaattcctcaacattttatgttgagctagctagctaattgaaggatgcaggagtagctagttgaatcagctgaggaagggagtggagaatagagatgggccataggtgctgcagcaaacagagagttcaaagagggctgtggtctcctgaagaagatgagaagcttgtcaaatatatcgccactcatggtcatggaagctggagctctgtccctaaatttgcaggtataaatgtgtgtgtgtgtgtgttaatacccctttttttttgcatgcattagaactcaaaatcaagctatctgatccatttttgacgcatactttgctttgtacttgcaggtttaaaaaggtgtggcaagagttgccggttgagatggctgaactacttaagaccagaactcaagaggggttgcttttctgcgctagaagagcaggtcatcatagatgctcatagaattttgggcaacaggtaaggattaatatttgagtctaaataaggaagtgtataaaaaggtagaaattaaaataaataaataaaaacactgtttctaacaatggggacggtagatcactagatgacatgaatagagtagaagaattacttagcctatatattctttcactgcattttgattacaagaactttatacttgtaacagatggtctcagatatcaaaacatctcccaggaaggacagataatgaggtgaagaatttctggaactcacgcataaagaaaaagctcatggcacaaggcttggacccaaaaactcacaacttgattccttctcatcagagggcagctaataaggttgcatgcaatatatcaccatctaaccaacaacccctttcaattatctcccaggattcaaagatgaaagatgtttccatggagataaaccctcctattctaacactagcttccccttatcgttctcatggcagcactcgactttcgttgcttcaaacaacaaccggcttacccttgcccacctcttgctatgataaccctagtgtcatttggaatgtaaatactcaaaattcttatgattcttccctttttccttgcgtgtcatccattgagaactcacgcgtttccccttcatcttcgacttcggtgaacccaactgggtttggtctcctagatgaagattgcttttggagttgtagtaacattgttgagccctttgaagccacaaaattattcgaaggcatgcgatcacaggatcaagaaaaccagctgaacaagatttgtgacacacaaatcgttgataagaataaaggagttcatgataatatggatgcttcatttgacacctctagctatgatcttgagttggtcgactccacattatttcctggttcaatatgtcgtgatcttggctccatggatgatctttcatggaacttttaggccaccatatgcgtgtatgtaactagcgctacagtaatagatagtaggttttgctcaggttgtgcatcccatatatttgataaggaaaaaacgcttccatttcttgctaacaattcgggtgtgaaattatttgtgataccactcaattccattattcatctaaattgggaaggtgctcttggatgttgagtgatcatagatagccatcgcctgaattaattttccccaaacgcatgttctccaccatcccgtgagttttgatgccatgagaaaattttgattaagcctaatcctgtagtttgcctcttaatttatttgtgttcatccatcaattttgtttttatattttcaatttatccttatatatatatatttctagtttgaattaactgagacaattactaaaatttatatgaatcaaacgttagttttagataacatgagattaagtaggtcggtcgaaaaaaagaaacaataaaaaaaaaacatttaggttagaaaaggtaaataagttttttttgttattgccgttgatataccaagttagagaaggcgtctgtatttataacgaattagataaaaacattgagcataatcacaccgtaattatttttaaatgaaaaactttgtcatcattgtaaatataagggtaaatttttgaatttgcctcctaaggtttatttattatcttgatttatttcaattagacctcatatctttcatttttattccagtcaaccttgtatctttcaattttgttcaatttttcttttttgttgagcgtaaattttaatttcatccctaaatttataaaatataatcattaaatgagtagagagaaaataaacgaattggagtcagaaaaaagtaagggatttcatttcttttttagaattcttagtcaagattttaatagagaactggataaaaaagtataaatatatttgagagtgtataagagacagtgatagtgatggttgatactttatattaaaaagtattttatatcatattaattataagttaaatttaatcttgtattgggacggtgttaatgaaaaatatacctttttatcatattttttaattaaaaaaatgtctttctttaattattttttaaaactccaattttttcattcttatattttgaattatattatgatattccataaatcttaatgataaatttgaaatttacaaagagtggaataaaaataaaagatgcagagtttaattcaaacaaatcaaaagttaaattttttttgaataatcatcaattaggaatatattaaaaaggccatagagttaatagcaaaaataaaatacaggaacatgattaaaaaaaagttaaaactgtagttgagaaaatgcataaaccttgagaagttgaatttcaatttaccctaaattaaatttcaagaaaagggatatcatgagcaatattattcttatatttattttgtgggcgtaagataatgcttttcttcgttgctagtaaaagcgttatgtatgtgggtattggctcactaaaacaaagaattaatctaattaggtgcatatttagcccccttcccttcttttttttacattaacacccttagatataaataatttgaagtccattagctagacggctaattaattgggccttcaactcgctcccctggccactgcctgatgggtcaattctaattacctagcccgtgatgattgtggtaccaaagttacaaactgggccagtatcgaaaagcccatgtattcgtttacttgacccagcccatacaactctctttcttttctggttcccattggcttgaaggcggaagcagcccgcatggccatggcccatgggactctacctgcagcctccgtccccatccacacaaatcttgctccactgacctgggcgatgaccattcattcggttcttcctttattaatgttaattttcttgaaataccgcttggattttcggaattacatttctaagagggaaaaaaaaaaaaaaactgtgacagcactcgaataatttgttctgaaattctctatcatgattttttcaccggacaattttatcaaatatttcgaaaatacaaaacctgaaatgcccttgattttatggtttatttactgttccttcagcgcgcctatctggtagcactggggacctcaatattttgcaaacaatcttacttttcttgctactgtcatgtggtgtttctatgcattaaaactataatccttcttctcaaaccgcttaaaaatatattaaaaaagtatggaaattaacttcctgaacttgtagccgaagccactcccattctagtggatgtacattcatccgtaggtttcaaagaaaatgcatgataatgatacgagtctccaacctcctacgtccaatatttttcccctttcgacatttaattacccgaagcttttttcttttctttgttgccgatacatatccaagcagttaagttttccactcggcattgggactattattttttattttggctgaataagcaactcatcgatcatcagttctcaccagtataaaattatggagtcccctaagttactgtgtgagcattatgggctcacaccatgatatcacggcttctttataacagggaaatcttttgtgcttttactttggcagaaacagtacttgattataattccacagtgaaacagagacacgaatttccttttccaatctcttttcaaagctggccgagaagtttcaacaattgtatgaaaaaaaacgaaagataaaaacagaaaaggaaacgatggcatgccttgacccatccttgtctaatgaagtacgtgtataacctgatcatgtggttggcaaaataatccccatttttttcttcttttttatgcagcccatcacaatatatcctacctttgtgcagtcaaatgaattttagtagtgatacaacaatatctgtaaggaacattaacaaaaaaaatatttgttaccttgtggtcatcctaattagtggctcttagtcttgcatggggagtacagtattggagttgtcttgagaggaacataaagagaagatctcttctagtgttccgttcatgcaatccttgtacatcatgtagtcgtcgattatttcaggcttcgatggcttcatactctcggtgatactaatctgtgggaaatcctcaagttctaaaggtgggaacggaaactggtaatgcaagcttgagcagtttggcatctgcatatcctgcatccacagcatgtcgtgtgattaataattggtctcgtacccaaaaaacgagagagagagagagagagagagttcagaggagagttggaaaaagcaactccttttgaaaattaattaaaacagtaaacctagcaacatgttttgaattggaaattatttcaaaatgtgattcaaatgggggaacatatgcattggaaatggtgatgtttgtggtgtcacatatagtagacccagagagaaaaatcaggaagaaagatgtttgaactttgaattatgttcgagtcagtcaaaagaagttattggagatggtgaaaaaaaagctaatttgagtcagtgcttgagagatttttagaaggaagctttaagaaaagacagggagtttcattgcttccaacttttgttgctttaacttaagatcaaaagaaagaaaaaactcaaagggcttgtgttgtgggccatttccaacacatactggcccgaggattgtactttcattctctgcgtgaaacacaaccacgtggtattttccatggtgtgaacatgaagctttcgcatcaaggcagaatattgctggaaatgtggtattggcaaaagagatgatcatatcatgatcagaaaaggatgacttggagaagatgattattgcatgtgaatcttggcatggcccataccatcaataacctaatgtttttttattatccttccatgtcacacacacttaatattagacatatatatatatatatatatattatatatatatatatatgcagttaactaaataattactaattcttggaccgacattaactagttatcagcagatcaaaccataaaaaaattaaattaatgtgtaaaaggaaccttgtttattgtacctgaattagatttgacgagaaatccacgcccattgaataaaggctagccgaactgttggcttcatctgagggaaacggagcttgtaaatcatcggctattgcagtttcaattggagtcccttgagtgacatccgaggaagatgtttcagatggaaatttacaataatcattgttgaagttttcatcttcagcttctctccctttagaactttcaataccgcttgtgtcatcccctaataattgttcttctgagacccacgctgcatccttctcttcattcccgttatttttttcttctttctttttcggaatatgtattgttttcttgaaaacacggcataatgcgtaggaatcctgtggtgcaaaaataaacataaatttgttaaagagaggtgtacaaagatctgtaaaagcaagatcacaaagagcagaaaaggaaacaagaaaccaaacaaagatagttgtaagtacacctaaagtcatgaaacaaagactctttcatcatcatatatgttgatgataaggtattctttattaaagagagaacatttagcaggaaaaggaagatctaaaatgatatgttggtgtatgaaaacaagagcaatgactaaatgtgacaggatctgctctatatatgtgtttgcgtatctgtcatgtaaagaagcataatccatgatggtttttcctcgcttgactacataaagtcctggcttaatttgaaccgtgctactgctccctgtatataatatgctcttgaaaatgaattcaaaattgtttctaaattttttaataatttgaactggaagaagctacatggagcactgaaattaatattaatattaattaattttacccgcatctgaaagatgaacataacatacccctaaaaaaatactctcaatttacatcgatctgtcattgttactaaggtttcctatgagaccaaaaactctcttgcagcctcgtgtaattcctattgaaagttcatcactatatatcttctacacaaaaccgacaatcaaactcatttagttgtctttttgtaaaccctaatagcctgttactactggtctacatatatatgaatgccaccaaaaccaccagatggggcagatccaacttcatcatgatgcatggctcgatgttcataattaattaattcacctacatgatatttctgaacattaattatgcaatgggttaaatctgtgtccctacttgatcaaatgaaaattgtgccgcaagcagccagtagtgaaagtgcaatatatacctttaaacttgatggtgcagcgccacacaatgagtcgatcaagcgatactcatgcattacccagttggttctaatgccatggggagctctacctctatagtacaccaatgtcttcttcatgccaaccggccgcttttgagagttcactggtctatctttccctgtggctttccagtaaccagcttttgttgccctgttggttcttgaaccattagggtacttcttatccctagggcttaagaaataccactccaaatctttgcttggtaaaaacgacttatctgttgatcgaattatcacaaaaaaggttgtcagaaagaacactaagagcatacataagaacatatgtaggtgatactaaatattattgacgtaagcatggaaattaattaattacatatgtaaaattaacacgtacctggtaagtcccatggctcacatttatagagatcaacctctgggataatttcaagctcaattgtgcggccgttgatttttctatcaagatagtaaacaacaagctcttcatcggttggatggaacctaaatccaggagggaggctcacgggcgccattgctgtgatgacaatgatcgaagagaggaggggtggggggaggagggaatagtggcccaattgatcgagaacgtctagatcgaggatagcatgttagtactaaactggcttgtacgacatcgaactatataggccactgttttgttatgacagagatggtaacgttaattagcccttcgactttttatgtattacgttgctgccattcactcaagagaccagacctgacatctttaattaattcccctgtcccttccttaatacactagatttttttgtcccttcctagatacacctatcagaaaaatgtttttagttaatttaggagaggaatattatgatgtaaacgaaggggtatttatgttgataaaatgaattcgggatattatacagcaacaagtccttcggcttttggagattctgtgagtgaggctctgtgtgaaaacatcagggaggataagcagcttctctgcttttgtctgctcacaaactaacaagaatcagacccctcgagaggatgcgtgggccaactaaaccgcccatagcctacaacacgcaatactaggcctccctcccccttcttattttaataaacagtactgtgtgtaataatcacattattgtataatatatagttctttattggagggagtttttattgtttattatgtgtagaataatagtataatgatgttagttatcgttgttaatgtgtgtttataattcatatattagttgtgcaatctcgcccttgtacacttgtcgtgctgtcgtgcaaaggcgacctggctagataaaaagagaggcctagcaatcagtctgtagctcaagagaatctgatcgggaataggatgatcatgtgccatttaccaaaaagcaacgtgatgaacaactcatgttctctgctgccttggccacatacagtgtagttcttgtaagtttcttgaaatattcatttctttattcattcttattgaatcaatgatttgtttaatatatagtaatcttaaatctcttgagtggcgcagctggaaacttagagagattcagccgtgaaagctctctctctcaaaaaagaaaaaagaaaaaaagggaaccatcaatgaagatatttcataactgatgatgatgggattccaccttatatccaaaatcaacatctgcatttgtagtatagtatgcttggtacgtagcgtacgaattatgtaatttaatgtttaatggcatctttcaatatccttgaattattgcacatttttgtactatcaatttaatcaatatttttttgatattttaaactaaattttttatacatgccaatgagaatttaattcactttcataaataattcaaagcttgttaaagtcaggaagtatttttttaaaaaaactatcatataagaccaaaatgtaaactttcatggagattgaggtgtcatcgatcgcataattctcaagcaatattatacttttatatttcattttaaaatatttaaaactgtaatgaaatgaatggttatgatctttaataatttatcattaaaaaaacgtaggagtgttacataagaaaaggtcacgaaaggttactaatgtacaagaatcgattcttaaaagatgcatggcattactcttgttgaaaggcaatggtatatatatatatagtccagagagaatataatatgtatatcaattgtgtaattcaggcactacgtatattgtgctgcatatatatatatatatatatatatatatatatatatatatatatacacacatgttatataattaataatgaattcagtacacttctagttaaaaacacgactgatatccatgcttttcttcatgcatcctgattaataacaattgtacgttgatgatgatcacaattaaaaaaatgacaggcctattttgcattatggcccaaagggtaatgggtggagccaaaagtctttcccaaattagagctacgaatctatccctaattaattaacaagtaaatgtctaaaattttcacctgaaatctctacgtcaaactgtcaaagtggggggaaagtaggctagttggtaaagtgtttaatgcaaaaattatctccgaaaactgcatgcatatacaggatcaaatttgatgcagatcaagagcaagatatattaaaataaagtaaaggaattgaaagattcaatatccatggggaaaagggagtaaattaaagatgtcaagccggcgaaaccatcgtcgatctttgtttggaatgcgtaaaatagcacagatttggattatcaaggtggggaaaacacgattcgacctgtgagcgttcttttaaatttctaaattttactttcgttggtccacatgtgggtgcatgccttcagtttaacgtaaacaatctgggaatttgatgggccatatgatgggcccatgtgaaaattctctggccttcttttattcccggatagaaaggaacgcttttatcattcaacagttgatgacttgaaggggcccataatagaaaatctacctggcacaccgtcacagcctagaaccctagactctctttttctttttgttttttttcgctttcttttcctgccatccaaactacttgtcctttactgttttattctgtttctattaacctccccctttgattcctttcctttccttaaaatatcatttccagacgagtaaagacatcctaccaactttaatgattacagacccaaaatctttgactgctgtctgatctctctcttttctctcaaactccaccgcaatatcatcgatcgatgtactcctttggttctaacttctaattatatattccccccattgatgcagaagcatgatcacaaaatacatagcgcaagggtttgatatttgcatgcacacacactcttagctccacagtttaccattttaagcacagcaaaactatatacaatccaagctagttctttgatcggcgtgaaatcgaaatatacatgaccagtaaattatagcagcacgctagctaactaagatgaccaaacccaaatgtctctctagtttaatttgaagtccagtacaccgggtaataattaaaacacaacgggccggagaaaacatgtagtttttattaaaacgtaagctactaactttgttgggagttccagctttctcttgtttggatgagtctttatggttcttacgctcaaaggtggatataatttgaattaatttttgtgcgacccaattaaattgagaaagagagagatgtagggtttcaagggtcttttgccgaaagatccttttacattctttactagccacactccacaatattcatcacgtattaacatagatatagtagctagcttcacttaagaaccttgtcaaccttgtatgtgaattaatatgcatgaacaagaagcttttgattagcataaaagagattccgaattcttctttttcaccaatgggattgcgaaaatatggtagctagctagacgctcctacatgtaaaagaaaaggaaaaagcaacttgatccatcaagttctaactagaagttatagtacccacattttgattctcatatacagttacgtagcttgccatataccacatgggtttgattcattctttattaatatagttgtgtttctttatttcagttgtttttttcctttctcaagaatgatagacagtagtgttgttatgttaaatggactctaaagccaggcaacctttcatacgatctaattaattaagcaacagaatttttagatttatttataaaattttattaatggactcatgaataaaaataatatatcagaaaaattttcgtcggtgatttatggtatgccagtaataattttatagatgcatttactgacgaacaaagcgcgaaaaaaaaaatttgcttcattctgtcggtacttccatcgctgattatacaaaaaaaaactattgtcattccatcgatgaatttgacatgtaatcgtcaaacagaccgtatgttattctgtaggtgagtaaacaggggcagtgacatttacaatattttttttccaactctttgtaatatactgatagactatgtccgtcggtaacccctgtcagtaataatttaaaaacatatatttttaaaaaatctattaaacagaaacaaaaaaaattaaaaaaaaatcaaatatttattataaatttaaatatttacaaattcaaatataattaatctaaaattgaggtgctgaaggaggaggaggaggaggagacctatgtctcaggtgcctattcttgatcggcgcctgatgactcatggttgtcagaagcgctctagcagcgattttgttcatacaacatgctattgactattttctaggtatctatataaattaaagaattaaggtatcataaatcatttatgtttaaaaaaaaaaacggcagcacatttcctatatggaagactacctaaattttttaaaactacaaatacacaacaatttaaattggaccgtcacaaaccagttgattttatttcaatccatgttaatcgaataattttaattatattaatttaaccagattttcaattaactttgctaagatcatttgtgaaatgattataagaggttaatattaacacattctaccctaaccatactctttaatatgaaacacatattcattgaggaaatacttgttatagcacttcacttgccttttaagatccagacttaataaattcaaagtaaaactagcattctctctcaattgataaatctagtacataaattatatcttcatcacagttaaggggaaatgtgtaatgaaattaagtatcccgagagataaggataattaactagtccttacttgtgttctgaaccacatggaaaattgtttatcttgtagtcgaaagatttgggattcagtcaaccgtgagttttcgaccaataaaaattgatgatgttacctatgagaaattcatcaatttatcaatttatgatagcataagagataaattattcgaaagtaacaacatatggagaattttacctactgaataaaaggtcttagttcatcgcagtttatcacttataaattaaatattatagacaaatttaaatctaccggtaattatatctgtaaaaattacttgttattgtattttttggttattttttatcttttttttttacttataattctctcaatatatatttaaaaaaatatttttattggtgcgtacggataaatactgcaacggcatgttcaatcaggaaaattcactataatttactaatggtatatttctagcgatgtgttatttatatttgttaattttttgatacgctgtgaaataaagcaacgggaaacacaagggcaaagagatcatggatcgatgcctgggtgtgatgtattggtggattgtaacagtagagcctagagatggcagttagcgatccataaagaataaagagaaagggattccaagatgtcggctctaaatctagcttccattttagtctctgcatacaaaagacaaatgttcgattcttcttccattacacgtaacatatacgaggtgtagctttcatggtatagctgcctatggttttgaatgcgttgtcatgacctcgtccatccctttctcccatgcccaaggaatagcgctttgccaaacttggacccctcacgtcacagctgagatttgaaagggaccatttccatttttccacaagaagtagcagcttgagagagaacggcaaatggacaaagcaatcttgttagggtatctagtcaatgtaatgatctctggtaataatgagaagctactcgaaaaatctgatcattcttggataattgtagctagctattccggagtagaagaatccccaacaaacaaaatacattattcttcaacaaataaataaataaaatgccgtgtgtgtgagatgatcggctatctagctatatatatagcgcacggcaaagtgaaaattgagctccgcgggcgttgtgtgttttcaagaatgaaccctgtttaatttaacgggtaaaaaaagaaaattggatctatctgcattcagatcatgtttaacccttttaaattatctagtcagcttgtactgttgaaggttcgaaactggtaattaattaacatcgcggtccattctacatttttatttgaaggtagggcagaggagtggtggttattatggccctcgatcgggaatatatttctccatccagtactacaggttaacggggatttctctcttttttaaaaaaacactctttcattaggaggttcggatcacaatgagtcctgattactctccatcattactgaattcccagttcaaatcgagatctcttgccatatttactaatttgattattttttatttttttattcgttttaatacgttgatattaaaaataattttaaaaaaataataataaaatattattttaatatatttctaaataaaatatattttaaaaaataacctgtatctcattattaaaaataaacaattttcaatatacctgtgttagcccaaaagtgattttatcatccaacaattctggcccataagttaggtgacatgtttgctggccattataccttgcccaaaagtaccaaaggaaaatcttgagaaaatacgggcccaaactaaatcacgcttctgggcctccctatctttgcttcaaactgcaagggccagccccagatagaatcactcgttaagttgaagcttcacccaggggaagatgtcgatactgtggaagaagagcgaggcctggaggtggatagtgaggatgacaagagactcaaagccattcttcttcgcattcgctgcatgatgcggtgtcgttccaggtgtgattgggtatttcgtgatgcaaaccaccaactcccgcaaccccgagctcgaagcccgcctccgttagaacgcgcgtcccgattcccctgtacgtacgttatatatatatatatatatacttgaatcaccgttgattttctccataaaaacgtttgatctgcagatttttgggcatggcccgctatttgtgattattgacatatcttaattcctgattattttgttaacttggttatttcaagaatctgactctgactctgatgctatatttttaagtagtttagcatcgaatgctagaaaataatatatgaaaagtacgttaatcactcatagatatcaagaggaagaatggaagggcggtaaagcttctgaaggatacctcaattagcatagagttgcagactagtcactggatacttttcatcttggttaagcttccaaatttcaatatatggcagatggatttcacaggtaaggccacttctaactgaagtcatcttttggtaatcacaggaatgaaagtgcatggcagtgacctcagagtagctgctttagatacttaggttagttcctctttaatttctgtctcatatcctagagttaagattgccccaaaatcttgggtcatggttaataattatcacccttttgatcttcaaatggaagtacatgttgacaaattttgtttgctcgaatttctcaatcagatgatgggtaaagttaatcgagagagactggcagaataccttggcgagctgcagcggaaagaggatacaaacgatcgctatgtagctgctctaagaggggagacatttacaagaaacccatatgtaaggattcagtcaatacccaagcggaataacactgaagctggcaaggagcagaaccttgataacgatcaaaggaagcagattagttgatggttcttgctgatgtgaccctttctatatttggtatattaatgtcatggcagcacaagaaatgcaaagtggtccctttccttcttgttacgcaacagcttgtagcctgtgttttatttggaatatttctgctttggtatggttttttcatacccgctgggaatgacagcaattatctcatattataatgtttctaatttgcttttggttttgcatcttgaacccaaaatgcttctcagctatttgcagtttcttggtagttcatgaagatgatgtcagtgcctaggcttgattccaggcctggcatacgaggcttgggaagaagtgacatgttttatgcacaagtgcatcatttataagtttttatcggtggatactatagttaagcatacaggatacgataataggactcatcgtaatcgcatcagaacgaaaggtaagtcattgatgaatttctcacattgcttacttctattcctgttaattttaaagttcaatgatggcagggaagttgattgagacagaaattcatacaactttaggctaaaagcattttgggcaccttcttaacttcgggtcaattttgctaatgagcagctgtttccctttcgaaaagcccttgcaaccccttgaatttgcagatgatcagtgtaaccctggggctaactccagtattggagttgagaaggaggttaaagacgtgcaggggtggcttttgacttggcgaatcgcttcccaaagccgtaaattatattctaaattacttacagatgaagtgattccacaagctaaattttgcagcatagcaaatatacatcattctcaaccgttaaaataagttctgcatcaactttagaaacagaacaagatacagagcgaagaaatctgactctgccttcacactcaaacacacgctcatgcgcatacacacaaacacgcactaaaagaaagcaagagaaccacatgtacagttcaagatacaattcccttgatccagtcgttaagcaaacagcctgatacggctggtgattggccggcggcatatagggcaactggatactctagatccacagtctctacaagtctacaaccaagcaacggtattagtatcgtaacaaaaaggttaagcaaaaacaaagctggcaatgtttatgtggcagctcaccatgtgcccacagccgaaggccaagtcctttctattagtcagacaaatagggcaggcctataatcaaattgaaaaacacatttcaaagttataaattatagacgagctacaatgttccagacaaaaagacagcattacacgagattattttcaaacctgggttctttcatccaagaccggagaagaaacatgggttggttcacgatctagcactggacgacgagaataaggaactggaggagggcgtggtacgattttctttgcttgtcccatggaacgtcttttatccaaaggccatttaaatatatgagacaacacgtaaaaacaaatggatggtatgcagaacaaagtggccagtgcattaggaatgctgggaaacgtaaaaatggaaatccttccattgctgttttctctttgaaattgaaagggcaagccaaccaattttttccatacccagattcaaaactaagacgtgctgaccagttttagaattggctcccctgctgaaggcctttattttgaaattttcaaaacgttttcaaatgctggcaaagctgtgttaaaaaaatggagcagtgaataaacaagtttatcaacctacccgataataccaaactcaacagctgctttatactggaggggaatctccatcagagcggctagagcaaaagctgtttctttctcggagatggttgcattttttgacataattgcagtgaaattaacgaactgcacacaattcagaaacaagttgataaagtgctagatcgtatattaaattaaatcacaatgttggatggcattcgaaattaacattcattttgttatcactatacctgaaaattgtcaaattcacgtgctgggagtttgtcatcaaatcttttcatgtcttcccaaggtccatcaccaactccaacaagaattatcgaaagtgggtatgaactgtttaagaatatcataaggttacacattgtaattgcttttcataaaagaaatggcaacacatttcagaataaacacaactccattttctggcattgttagaatccgatgatgaaaatcattagattcaactttacatccacttactgttgatacaggctgactggcatgttagggaacacaaaacaggtaaactcagtgcaataaagttatgaataactgactgtggaggagaacatgaagcaatcattctgcatcctcgatgttctgtgtggactttgagtgtttttcacatacaaatgcaatatcgagctggcatgacacaaacaaataactggataacaatctggttatgacgcaagataatctgtatacttactaggatctaaaagtagattgttgaccccttatgattcatttgatagtttacaagtgattgacatcgcaaaatgggatcacctctcaataaataaagacagtcatcagttgaccaccttctttttatgcatctgccaaagtcatgtacatctctatctaggcaagtcatgtaacaatagcaggtcaagtatagcagtctgtgaagtggaatgtcatggccattctagtggcaatgaaaagtaagtttatcaagcagctgctaatgattagcaaccctattccataaccagcataacaccaaatgtaaatgggctggcacccgaagcgcaccaagaaagtgacagttctaataagaacctaagttcgtcattttaattagatgaaagttatagtatgacactaggatatattttctatgaatgttagtctgagcaagtttaaatgatttgcatttatctgtaaggctcgaccttgcatcgacaattgccttgattgtttgctcttcttgtggactcatttctccatcgcctgtatccacacttcttgtgaccttcacagaaaaagagactgttactttgattccctatgcatccatccatacagaaacaaacacatgcaagcatgcagaaaaggagagagggttttgaattcaaacctggccatctgcaatgatgagcaatacatgatattggcctccacttttttccacaatgtcaattgcagcctcaatcaccggtccatacgaagtcggcccttaaaaccaaaacatatatcggtgaagatttttgtggcttgagaaataagtaaaacacaagaatctttgtagaagtaatgttcaaccatgggtctaattaagaaaactaaggaactgataaaagaccaaattccaacgtcaaataagcaaggaacaaacctgaaagtcgcaagtttggaacaatctttttgtagcatgccaagacttcttcaaaaccatggcaaggtgaatgatcactgtgaaagctaaacacctcttgatcatgagtggtggctgtatagataaaaagaaaaatcaaatcaacagctgagttataaggtgcaaaactagaaacaacattgttagaattcaacttccagggactgaacctaccatcaccaaagccaaaacaaggaattaagttgtcttcatcaaaaggagccatcgtctttccaataatagagatggctttctcatatggattaggtgtgtctccgatggcatgaaggctacgattattgaacgagactttgcctttaaaatgaaaatcaacaattgacatccatgagagacaaaccaattcaaaggaacagaaaacacgaggatataattgaaccattctgctatattattagattgccgcccccttaggtttctaaagattggtttttcgactctgaatacttatttcaacttcatggaagtctcaaaatccaaattcctgaataactgataaagcaaaacacaaattttatggtacaaatcgacgatgtgattagttcacttgcacatacctgtccattcattgcttttagtgaaatcaattccaacaacgagattcgatgattccagtccagcttccctcaaggctgtcgtaacctgtaaaagagggggggagcctgttagtagtagactgcgagaattcaaccgagtagccatatttttatctatactgaagcaacaaacttctgttattgaaattacgcccgttgctagcaaatgatttccatgcataatcaacaaagcaatacctaacgttaacaatttaatgctataacacatgacgagcgtttgcagaaggtttacaaaaagctctgcgtatttgaagttgcaacttgcacctcaccccttgaaccattaactcgactaatggatttttaaaattaaggtatatattggtcaaattaaagaataaaatctgaaatataaatttaagataaaatacaaggaccatattaatttccatcccaatttatttatttaattttggtcaaactgaacagtcgacaaaagcacagcagggtcccgaaacccagtagagttgactcggtcatttgcttctgttaatcaaaacagcagtcgtccacgtggatcacgtgaacacgtttacatttttctttgaatgattttctttttacagataccgatctaaaatgactagaatagtttataaatagattggaattgagtataaataataaggctaaagatgatttttgagcatcaaatctgaaatttattttttcatagttaataaaaaaatacaataattctactgttatatatataatcttaaaaaataaataaaaatattaagaaaatataatcttaatatatttttaattgtaaaacacttttactaaccactttacattatattattgaacacacattaaagcttggttcacgttgaaattgaatccagctcccgttcccaaggtgcaggctttggagaaatctttgtacgaagctcacttaacataagcttattcatataaattaagcgataattaccatgaaaatattgtagaactcgtcgagtcttgaatgtggactcgtgtgataatcgataatttattgcaagagataaagcttatgatttccattaaatttttaagtttcgatcattgaaaatgaaaatgagttgcagacttttttttaggataaattacaatagtttccattaaatttataataataataataataataataataataatctaaaatatgaagatattataacaaccaccatgagaaacatagaattatgcatgccaaaaatattaaaagcattttaaataaaaggatgaggtttttataatatttatttgaacgtgaggggtgtggggttgtatagggcctgtttggaagttatagttgcggttgattttcaaagtgtctttcatgttgaaatacattaaaataatatttttaaattttataaaatttatatttgaatcagtacatcaaaacaatttaaaatataattttttttaaatttttacaaacgtggatcggcctgcatttcaaatactgtctaaattaaaaaaaaaattacggtgttagtagttttatgatacttcaagatatttttgtaatttaccttagtttttgtactatattaatattcaaattgaacgtgaatgataaggtgtgagtctcgtgaattttaaacgactgacttctcctataataatagctgtcacgtgtgtttatagaaaaaaaaattgaatgagaaatctgtctgtaaaacattagtagaaaagaaaagaaaaatagatgaaatttgagaataaaacggactattttaattatgtagcctgtttttttataaaaaaaatcactcattcaattattattttttattattaatgtggtgtctaggccaacttacacgtaccttgactaatctcacggattctaaagttaataatcatgtaaatttctaataatactagagtttataaaatttaaactagtaatatttaaagaacaaatctagaaactgattagttaaattatatccctcgagattcagtcagtcaattacttgaaaaccttcaatagtgcctggggtcaccaataatacttgatgattgaaaaaacttgcttttctttattatcttatctaactttcacgtttccattgagaagaagacaccgtgttgacgacgtgatgaccaaaaacgcgttagctttattgccagtggttggcaataatggcccctctcttctctcagggaatcatgacatgtggagtgtatactttctttcttgtttcataattgacaatttcaacttcgatttttatgaattcatatcgaatgtttcagtgaatatttgttaggaatttgattaatatttgattaaatgatgttatgaataataagaatttataaaaaaattaattttatatttttataaatttaaaaacacttttaaatcacatataaatataatttcaaatgtaaaaataaactatacatatgattatatctttctttttctttgttttaaaaaattgtattctcaccgtgataatttgaagttgttttgatgatttaggactgtttagaaatgtggttagattattttttttaatgttttattattttaatgtgtttatttaaaaataaaaatatatattattttaatatatttttaaagttatgtttatttttgctttttaaaaaaattaaattttttttattttttatttgttttaaattaatatttttttaatattttcatattattttaatttgttggtgttaaaatattttaaaaaaactaaaaataaattattttaatatattttcaaacaaaaaaaactttaaaaaatcacacttctaaatatcccataaaaaaacacatggaaatcaaaggattaaaaaaaaacatgtttcgtgagtgtctgcgtgtgttccatgaacctgtatatcttaggagtgtttatccttggccgtttggcgccggaaaaaaaagaggttaagattaacgaaaaaaaatcagaaaaaataaataacgagttatttttcaatttattaaaaaataacaatatagctatcacttttttaaaaaaaaaaaaattaacatgatttttcttttcagtcctttcaaaaaaattcgctcttatgtggctttgttggatgttatcggtttgaataaaatgacagtattttacaaacaaaatgtcaaataaatacctattttcttcgatttgaaaattttcattggaatagcatttcaaatttcaacttaagtttctaacacttttgaatttttttaaaattgttttaatgtattaatataaaaaataattattaaaaaataaaaaatatattttaatatatttttaataaaaaatactttaaaaaacacagctactttattcctttataatccaagcgggaaaaaaaagaaggaaagttggcgtctggaccacactaacagtactgtcgtgactttgtttaacagaaaaaataaaaaataaaagcaccttgcgatattttgactggtcggatatcacttttccattattattttatctttttccatggagcattgtaatatttttttagaataagaagcaagtagtatttgaaaagcaaacgaaacggcatggagtggagtggagagtgcgaattgataagaagattcccctgagattccatcagggaaaagtcaaatcagacaaattgactaagatcgcaacggctaaccagacaaattttccgcaagtcatcaagaaattaatatccattctcttatcgaataatatgtgtgtgtgtgtgtagtttgctcaataagtggaaaattatctatcctgaatgaaaattaccagcaaggcttccaagaaaatgaaagaaaataattaaagaggatgattggcacgtacctgttctagggaagaaaaattatcagggatgaaactatatttctgcttgatggattgcttcttctccaatttggaaccaccctttgcttgactggttccctttgcttgactgctagtatcactaccagtggctctagcagtattactcagtgacgatgatggctccttggacat

SEQ ID NO: 41 - DNA, 72356 bp, Salix sp.
  misc_feature (54269)..(54275): n is a, c, g, or t
agaagggatgtgccaaagcgatgcagggcctctgttccaataggaagagagggatgtgttttaaacatcaaaagaattccacaaacatttttagtgcgatccaggacctctgttccatgataagaaggtagggtcaccaagtcgcctgagatggtacaataagagaaaaggttagaaaatatcaaaagttatctatttaatagcatctcacaaatagtcgaatacacagcatatgaaaatcttatgctgccgactaatgggaccatgctccacaagtctgatgctgggcacacttggaaatcctcattataaaatgcaagccttatgaagggcaattctaagtttctaacagcctcactctttcaagaaccctaaattcaaatttgtgtctgtgatcaacttacctaggcttgacgaaatacacaattgtgaaacccattgacaaagcgaagcttatcatcccaacagtgagataagcaatgccaagaaagtcatttcttccgccaatccagcttgttgttgaaagcacgagtttcttcttgccattaaaactgtatgtgttatagtagttcatcagtgtcacgtttatgacttctttttcctcgagatccacctctatcttcccatacaactttctaaaagttggcagagctgcagttcgcatccaaaccatgaggtcctcctgctcgttcagctgttacacaaaatcatatatgaccaagtcagtcacgtgccaattacttgaagtaatttgcatagaatagaaaagaaacagtgagaaaaattgatggttctctagtatattttcacattttagcattagaagaggggatatgacacgcaacaatatcccatcattttataagcctaatactcaacaccttgggtttaataaaaatcaactccttcatgaatgaaagaataactgaggtcacacctaaaataatcctgaagttgaagttagcaacctgaaaatacaactctaataaacacaacagcaacatagtattgaaatataccaaatgtccatagtgttattaacattattaaagcctctaagggtatttttcaggatgaagttgaacagttctttagtgtgtgatcagaggagttgcttatatattaatttgaccagatgagtaatagtcgagggcggcttactggtatcgattcattgagagttgcaccacctacaagacctcccccctgaaagtttttaggaaagacatttttaccgaaccttttctgcttatcactcttccaagcaattcccttcttattcactgtcaatgactggttctggcgggagaagctataagtatcattaaacaaactccaagctatcagaccacagggtacaattgcccccctaccatttgcaatatcttctggcttacaagcacttgtatcattctctttactcgcacttttcaactgttcatcacttcggctcttcacatacctgatttatttgagcaatcattaatattaagccaaataatcaccacatataaacttaattacatgtgcttcaactttcagtgagtaagcgtccagtttatgatcatggtaatcatgacagtttcacagcctgttcaatagttttgacaattctgatttgatctaattttagtatcttataaattgatgggttgcttttcattattaaacacatgaaagagagtaattttctagcatcaaaaaatagtcaaacacactattctgagatgagaaacataatgttgaccaccaattaagcatgcgcacttcctgaaccacattttataattggttctctgggctgtcgcctatgatctacgtaaattacacacctggatagtcctggatatcaatgcccccaatatgattatatgaacaatatacctagaaccattatgtaaattctagacatgattacttgaacccgtcagaaattacaagctgatagagtacacgaggttgatgacatacctacgatgattctggtagaagttgtcaagctgatagtaaacataaataggttgcttcatacgcttagggatctggcaagaaaaacaagaatacaggatggaagatcattattcactgtttagcctcgggtcatggtagttaatttctatgattagcattgaagccacgttgtatgagagaaaaagatactggtgtagattttttgtcagaagtagcataaagtaacctactggctactaatacactactgatacagcaccacttgcagctctgacaaaaaggcaatgtcactagtcgatagataacaataaaatgaaggtatattgtatagcagaaaataatactggaataggtctttccttgttatcttataaatccacaaacactgctaataaagaacatagaaaatgacaacacatcaaccataataattgcaaggacaggacttaccgtcatggatattgtgcatgttttatcagcgtcgctttgtataaattggactttattggttctatttagaaccggaatgcattttgtttcataccgttcaacaacttcaacaacctgataaagggagaataacctataaacaaccataggtgaaaatatagctaggattgcaaagatttaggtgacactcaagctcacatctcgggaaccaatcaagcaagcaatgccgatagggatgaagacaatggcaataagcatgaatgtagacaccacctgcacaaagagatatatttggagttaataactctaagtgctcatttgcatcagacaaaaccagttaaaaagaataataaaaacttacccatcgtggtgtgagaattggcttgcaagcaggaagttcttgttgagtaaactttgaatctgaaagaaaacgaaacaatttagttccttgaaaatcacacgtacaccccatatgtgcttgtgtggtgaaaaagacaatttgggagctgcaattgaaacatcagataaagaagctgctcagcggtgctctctctatttttactgttcttgttgtttttaacagctacattacaataagattacaagtgtattttaataaaatgaaaaaaaattgcagattttttgctctggaaaatataatgcatccctataaatttaaaatgtttctatccctctatgttgctttgcaggataacaattacgctgacaggcaactattctgaacactagaaacattctgttttcaatcttaaagtagatcacatgagcattcatgcttggacttggatgtgtgtaatgttaatacaaccaaaattactaagattccgattcatgtaatgggaaatgtccaattactgagtttcattaatatcttgttatcgaacccaatttaattcattttattgccaacaaagtttaatagccagccatatttctctttcaaagggggaatttccaaatatatttttttgaggaataaaaaaaaaggcacggatattccaaaaacggaaagacttcatgatcaatatagagcaaattagatgcttggtatgaaataaaatagtcagaaaagagctcacacaaccaatctcatgcaaaaccaacagcaaatcaaaatcacaggaacccataaaaaatatacataaacctccgcgtggatgcctataaaacccactagtgatcccagaaagaaataaaaaacctgagtctatggaacaggctagcaagaaatttaggacaaggttcaaaacttagcaacttaaaacaaaactaacaacataatcacgagtgggcagtcatgagtttgcctaaaatagcaaaaaataactaaaaagtgaagaagagatcacatttgggtcgctttgaattcctttttggaacgccagaatcacccgatccgttgcctccattactggacgatgccgtgtggctactcatgattgtgttgaaagatgcaaacaaaaacaaacacttgtagtttctgtctctctttctttctctaaaaaaaaaacacaaaaacagccgaagaaagaaaaaccttaaaagagaaagagagacttcaaaaggaaggaaatggtggagatggctgtgtgatcaaagagataaaggcaccttttaaagactaagaaaacagagagggaaaatataaataaataaattttctaaagaaagagtggcagtattaaagaaggtgagtttttagagagagggaagcaaataaaaaaatcataaacaatattcttagcccctatagattcaaaaatgtttcatgttggtcctcgtgatttaaatttcctaacaccaacgtaagtttcaaaaggtttcgatatcattgtaagtatctattagctagcaatgaacattgccgaggccatgttgagttgaggggtgtcggttgaccccctcaacttctcaaaaagtactgtgattacgtgtaaaaaaatataaaaactttgtagtttgttaaaatattgaaaaatccatagaagagggctggatttattttttttgcagaaaaaaataaatgttcaactgttaaattgctaaaaaaagtatattattttatattttatttattatcttatcttcgtcctatatactattctccttatatctaatttaattttattcaaaaccctctcctcattgtcctcttttaacttttattttcctcctcttgtgtgttttcgttttttcaaggattttgatatgatattacttggatttaaattatcaattatcgtaaaatcaaaacagactcgattagcttgtcttgatttcattttgattattttttagtattttgatttttcatctagttttattttaaaaataattaaaaaggggtttttttggttgttcatctgtagctttcatgagtggaaaatcttattattctgatgggaatagagaaatctacctcatcggagatggcaccggggaaatctccactgctatccgttaattattaccattaatcatagcattttagacttcattttcagattgaaaggtaaaatttcatccggatagcacacaaattgtatatttatcaacgtgttttaaaaatatttaaaaaacaatgtttatttttgttttaaataaaaaatttacggtgttttaaaattattttaatatagataagggaagattttatttaatgtgaaacgataaaaaaaaactcgggagacttatgtctcggttaatacaaggcaagttcaaacaaaaattgctgactattttcctttatcttttgaaatgatgtattttttacctgactgtaatttttttttattaacctaggttcactcggacacaactactcgacttaagactgcacttgttccgcacgactaccgtgactggtctaaaatacaagaaaaacaataaaggttagatctcaataaatcaaatattgaataaaaaaataataacaactaagaaatgtatagacttttatgcaagataaatgagagaacaactgaaattttgaattggagaaaaaaaatctagagaatgagggaccaaactggataaaaagtaaacaattaggatcatggatccaataattagattggagacaaattaaaatatgacaaaagagctcgtagtgaaaataaaaatcaaaacatggagggtcaagcataaatgtcataaaatctcgaattgaatggaaaaatcaaaaagaaaaattaaatcaacaaaaaaatccaaatcaaaaatcaaaataaaataaaaaagcgagagccaaatttgaataagataaaaaaaaatcaaaactcatggatttaaagatttactcaacccaatggattaactttgtagtcaaagggagtgaggggcaattaccaagccttgtttcaaaacaaatcgagggataattgatatgatgtaacacaatgaaaaaatcaagttgactcctgatgatcatgatgatcacgacacaaatgtaatcaaagccaagtcaaattccctagcacaaagattcatttcctgacttccaatggtagattcagtaattcatcgtgaattagatatgaaacacaaaaatacctcaactcgaagtaataggtaaaaatttattaaattgtgtaagaaatcataagaagaccaatatgtccccaaataactcaagaacaccaagtgaatcattcaaaaaaaatacaaaattacccttcaaaacagccataataagttttgttgatagaaacataaacatcaaaacattattacattgtccaagtttctgagtttacggttacggtaaaagctgagtgacttttaatttttaaataacaataactaaatatcattgacacggtatgataatattatacatattcatattttccatcaaaatgaaatgtcaattgtttagtaattatttttttcctctctaaaacaattatttgagctgaataataactaaataatactaacatagcatgataaaaaatttcaccttcattctttctttatttatttattaaatttgtgaggaataaaaggaatctgaagaatatagtgattattttttataatatttttcactgaaaaatatatcaaaacattactattatttaaatattatttttaatatcaacataataaaatataaaaataaaaataaaaataaaaagaaacatccagaggcctccaaggctgaacttgaacgctaccaggtcacacatagaatagaagtccactcataacagcgtggaatagaatatatttttttcttcctattccacgcggcatgcccagctggctgctttcaacgctccgtttctttgttagttacgatttttttatatatatttagacaaaattaaacaaactagcactgtcaacgtgctttaggatttggataataataggtatctgccaggtcattactttctaccacggcgacgtttaatcgccagcgctgattaatattgtcatggtagtgtagaagcgaattattaatctaatgacaaagaaaaagtcattcaatatatgaatgctagacgagagaggggtggaggctagcaaacacacatgtgaatataataaaatacacacatgaagcctggtgatggccgcccttcatgccacgccggtggatattttgaattcagagtgctatatctgtaacccttgcatgtctcgtcaattttgtcgatccctccattgcaaatttggaatgctagagtagtcaccctcgatagaccaattatctagaccactaataagaattttatcattgtctcgtattgaatggaaaaaaaatgtttttttttattttaaattattttcatgttaaccattttcattttataggagaagcttcggtgttcgtcaaacatctctgcgtggaagatcacgccgtgttcgtgtagagagattgatgggtgaactacacgtggcgcacaaagtcggaaggatttttcatccgcagggaaatagctacgattaacactggaccaggagaaaataataaactgggcaaaatacaattaaagagggtgaaaaatgttaaatcatccttctcgggatttttatatacttatttcacctcgcgtgctgccatctctagaaataagagacagcatgcagggaaaataatttttttttgataatcatataattatgattataatttttagaaattgttgtataatattaagattattagaaaatttgatggtccacataaatctaaaaaaacttattgtgaaaaaaaaagacacatcaccttaatgcaccatgcctaaaataatattgttatttaattcaatatatgtgatatatatcctttaccatgtatgtttattttcaatttttttgaattatttcgaatcaaattgtatttgaattaaattatgtaattgttttttctgtttattttatctatcatcatgctttttttttattattattattgttatgctatcacctagaatctaaaacgcacggggaaatccgtgcagaagttgccactgcacactacgacactatatatttttaaaatttcattttgatcctcgaaaattaattttgtgcaatttgatcatggttaaagaccagttaattggattcttcaggcaatggtaaaattgaaagaatataaaatataataaaaaaacacggcagacatgagtgatgctaaaaattatataaaaaatttacacctaggtacttgatatcttaaaattacgcaaaatatacagtttagttcctcataaaccaaacaattttttttaaaaaataaaaaaatatttttattgtttttagaccccttgaatgaaaagcagagagatagaagaatcattggaatttggaatctaatgatgacaaaaacatcaccgtttaagtaattttttaccatcaaaaaatatattttctttactatccatgtgctccattgcatgtaaagggtttgatgatagttattttaaaccttgatatttcatgaaaaaacatatccaataaagataaatttaacccgatttaatttcatgttttaagatcgtttcttggcatcccttaacaatgtgtgcgagccaaagcctaaaggtctacttgtgtgcccgagattttccttgtaatgtctttactcgcctaattgcttccaccctctctttcaagggtgaatataatttaaaaaaaaaacaaatttatcaaattcagttgagagtatgactcggagcacaagactaacaacgtgaagtcataaacattcaagttattttatgatttttttaaataatatattgtttaatatacacatatatagagagagattcatgtctcaattaatatccctttcatatgatattttttcttatttaatatttttatagattttttttaaggcactttgtgtgtttagtttctgaaaaaattattaagattaatctatatatatttaattttgtatatagattaactttattttttaaaataaaaaatatttataatatatgcaatcttgtatattttttcatcaatttaacatctgttaatttatattattatttgattgaataaaaaaaaatatttaatgaacaaattcaacaagtataactcgataaatattatacattgtaagattagatattctgatcgatatttacttcttaatttttaaaattttattttgagttattattaatatttatcaacatatataattctctatttatctaagtaaatttatacatgaattttaatttttatatataaaaccatgtcaaaaaaaatatcatatacaaattgtttatatatataaaaatatttagcgcgcggccgaagcgcgagcgttgttgagttaacaaagttttctttctttttgtttttttaaaaaatgccttttcagtgaaatgttaaatttgacgctgcacgtagcggagcacgtgcatatccacataggctccgaaccagcacttcccttctcactataagtctccactagccccttccagcatatctcgctggtggttagatagaaggaaatcattgaaaaagacggaaaaaatgacgttagggagaatagctctggcacgcatcccggcgaccaggggcacaatacacagactcttctctacaacactttcgtcttcttccaagaatcgcacctctcctccactctctcgccacgtaactactactcgtcgtcttttactaacgcataagcatcaatagctttcatctttgtcttgctaattgaatacagcgatcgcgcttttgaatttatttacatcttgtttaattcatgttttaatcgctttgaaataagtagcatttcagcaaatactggttcaattgacaaataatttgtttcattaatgtaagtataatttctgtttgattttttttctgtcattgttagttgcgaattttattaatgttttcatggcagatgagcatgaagagtgacaacctggtttcaaagctaactagctctggtctattaaagacccagggtcttatcgatggaaaatgggtcgatgcacatgatggtgacactattaaggtctgccattattgtgcgtgtatttgtttgtgtttttctctactgcggctactagttttgggcattgtttctttctgccacccatcacatgacatgtatatgttcctttcatgggacggcaggttctcaatccggccacgggtgaagttgtagctaatgtcccatgcatgggtcagagcgagacgaatgatgctatatcatctgcctatgatgcatttagatgtaagaaacttcatactgaaccaaccgttcagttcagtaaaatgtattactgcatttatgctattcacatcaataaagtaattaattaaccttctcctactggcgctatcattccctatgttttgaattttgtaagaggaatatggtttattttgcatgcgtggactatctttcagtactggcagggggaatttctagtagaggattggttatggaagtgcagttattgatgtgttgtctttgtaggttagcatccatgccttcagaaggtaatgacacttggatgtctcctttacagtatgccaacctcattactgaatcgtagagcatacatatgtttttcactgaacttacgtgcatcatcttggttattcctttaaaagaatctgggttttatgacaattgggtgaagtattattaccacactaatccactattattgttctcaatcaacctgcaattcgtacagcctgcaccacatgactatttgctacaatatattaaataccacaactcacacacaaaagcttgtggtgtttgtgataataatcaccgtaaacatggcagtgatgcacactcttgaaattctactttcaagcttctatgtgttgcatctttattcctcttatcctagcttttcgcagcacaatttgttggtgttttactgcctttcagctccctatcttagttgtctctttgagagttatgtgatactctagaagcaaagagtgaatgaaatggtttaaattgagtagttcttacgacttactagttgatatacccttcaaagtattacatagacctttgcgtagatataatcttaataggatctactcatatgacttagatatggaaacctcttgttttttaccataagcttgctaaactcctcattgtttatacgcttttttcctgctcagctataatactagcatattttgatgcaccttttctgatatagcttgacattttttttttgtttcttttgctttactggacttcaaatgatattgaaatttgaaaaaaacttcttgctgatgatcgcaacatgttcattgttttttatttgtccagcatggagtaaacttactgcttctgagaggagccaacgtttacgaaaatggtatttgattcttccataatgattttattaaattacatgtgttgtaaatgtaaatacttccaaattaatcaaatagttggaaataactgtgttgtatcggtacagtattatggttctctaccctttactgaatctcatatgatttccccctattgtaaggtatgacctactaatttcccacaaggaagagctaggacaattaataaccttggagcaagggaaacctctgaaagaggccatgggtgaggtatctcatctgaactttgctttcagaaatcaggagataagcgttaaccctacatcttgtaactggtcattgtcaagcaacatgtgatccaagactccactaacaggttatttatggagctagttttatcgagttctacgcagaggaggcgaaacgtgtatatggagatataattccatcgactcttggtgatcgtcggttatttgttctaaagcaggtgactataactgtttgtgatatttgaaatcttgtttaattgcagatatgagtaaattagttcttccgacagcctggctactcatatagatgtcgacaatttcgccttggtttgagtctcttaaacaaggccttttcaaattgagttttaatttctggcaccagcatgcatgtttaatgcaccgatatttgttaaaactacataaaactcgtgattgggacacattccttacatgaattgtgcttcagtctactttatcctgtgagcagtccagaaatgtatttctcaatgatctatcgtgatgaatagttcttgccacaacttttcttctgtgagctgtttacatggctttgataattttcagtgctgcttgtttctgtgcaatccatttatccagcaatctcatgagtttttccagcctgtaggtgttgttggggcaatcacaccctggaactttcctttggcaatgattactagaaaggtgtgttcattgtaggatgattttgtgcaaagagagtttacttttctggtgcatgagttttctgttgaagaataacatactttttcctcacttgcataggttggtcctgctcttgcttgtggttgtacagttattgtaaaaccctctgaactcacacctctcacagctttagcagcggctgagctggcccttcaagctggaataccaccggtgagtctcaaactttttatgtgcactgtggaagtttcttaatttcctaggctgtgtaagatgcaagtgcttggatataatgtggccttggtcatctatgtaaattgtgtcttgctagacattgaagataaagttgatactttatggtttcaatgataaagacttatcctttgtgacacaatgaagtttttggagcaagttttggttggaaactaggatacttgtaatgtaggattttagtcttagcatccaaaaatattctattatctggttgtgcaagaagaagctgcagcaagttaacaattagaaatatttactaaagagcttaaaaagtaaggagggatgataatgtaacaaaatgaatctaagcatcatcccatggttattagatgtttatcacaagattccaactaagcaaagcactgaagaaaaatgctcttgctgactgttaaattgagtgactttgtgttgcatgcacaccttctattgaagaaccataattgacaaatcaagtgaaatgctcagttgtatttatatcacatcataatgattgctgacctatgctaatagtcagctgagcatccttactgagcattgaaacagagaatatccatcactggcagtcgtttttgctccatattctggtttagcatgtccttgcatcacaggacaacagcaggatctggtctatcatcctgatcaaactgcattctgcttcgaatgagataatgatggaatgaatgtagccttttctggcctttttagatgcatgtcatacacaattgatgtgttatattagcgaatatgagttcaaatttgttgaaattctgttcatttgtttttaatggttttaattttcaatatttcagggtgttctgaatgtggttatggggaaagcttctgatattggtgatgctttactagcaagtcctgaggtttcatatccttcctctatttccttaaacttttcttctctttgacaacatggcattgtcttggacagagtaaatggatattcaatgacataatgttgatactcttgctttatacatctgattcaggtaagaaaaatcactttcacaggatcaacagctgtgggaaagaagttgatggctggtgctgctggaacagttaaaagggtatgcatagcatgcaaaatgaatcaatgtgatgatgtttcagaaactatcttatggctaactgtcttttcccttaatctttgtagctgtctctggaacttggtggcaacgcaccctgcatagtatttgatgatgcagacctagatgtggcagttaaaggatcagtaagttagaggggttcccagtgcatgcttatattgatagtggtatcgacgtggatatttctgagtgccatttaatattgtttacttttcatgtttagacatatcagatggacacacactaaacctctgatctgactaggatggatattggtgcagtgggttgttaattgttggttagacatgggggtccatgcctccatatttggaagtgtaaccttttgtgttgattacattggtgaagccatttaatttactgatttcaggacagcctataagaggctttgattcaggattttgagaatgtgtccttccttcatgatatagctctttgttttgcatccaatattgggtggtcttgtcatggtggtaatcttatcaaatcattttatatcattgcagcttgcagcaaagttccgtaatagtggacaaacatgtgtttgtgcaaacagaataattgtgcaagagggtatccaactacagaattacagccctgatttaccccttaattcgaattctatatgtaatatgcagcattatgatttctgatgtgttgcgcctttatgtgcaggtatctatgacaaatttgcagatgctttttcaaaagctgttcagagtatgcaagttggggatggctttagtgaaggtgtgatgcaggtatgggtagcattttcctctttaaaatatttcgtaattgttcccttattgaataataatttgtgcaaagctagtcagttactctatgtttcctagatttagcagtctctaaggatgatgacattcagtggttggtgacgcaagctaggctgctttatcatctttatcacttcctgtttcaaagagtttgcccaccttccctttttgagctgtcctaaaactattgctgactatgaaaagccgaaattatcaacaacttgatcttcttgctatatgatgagggtcacatcactatatccttaatttaactcattttattttatttttagttcaactactttctcccttgtaaaattagatttaaacgaaacccttcatttattgagtttttcaaacataattcatattaattgaggagtaaatatatcaatgaatttcaatgaaaaattgtcttaattatactatttattttgctagaaattatgcctacacatggtagaaaagttgtggttaacatgtctcataaaaaaaatgttctttctttgtagtttcaaaccttgatcaactactttgtatatcaaacctctcaccattccttcataaccaccttgatatgattggttttgaaatataataaaggctaatactggaaagttatgaaggaatggatgacatgccatccaattaaatgttctttcataatctttgtgaaaagtggaagggtactaaactttgggtaagagggagtatgtaatttgtttggatgaagatattctgcttacacattcacgcagagatgtagtgtgttgtgtttatacatctagaacctttttattagctactttcatgagatttgaagtgaacagatcatggtgataactattagtttcctcacagggtccattaattaatgaagctgcagtccagaaggttagttgcattttatacatactattggccaccatcttgcttgtgttaatccttgtttattagtgagatttgatgtcatttggtccctttgtgatttgggtttcaggttgaatcatttgttgaagatgccatctttaaggtttgccttttctgctttaccttgttcaatgtactaggttgaataaactccacgcattatattgtctttaaatctttcaatatttcctcttcctccccacaataccctcgacctatgatagcattatatttttatgaccaagggagaatttttgtaggctgtggtaaacattttttatgttttggtgaaacctagaagtatttgaaatattttcaacgctcaaaaactctataatgcaattaggctaccttgacattctgtttcttttttatatatttctcatttctaattaaccaaaattgtacttgaagggagcaaaagtcctccttgggggaaaaaggcatagccttggaatgactttctatgaaccaactgtaattagcgatgtcaccgaagcaatgcttctttcgaggtaaatacatgaagttaatatattgatcctgcaagtctcagctgaataattaaagctgtccttcagctttcatacgacaggtaaaaggatagtggtggttgttctctgccacttgctgatgggtatacattcttaccttcagtgcagctggttgaaacatgcagccatactaaaaactaatagtccaacctttaggttttggcatctaatcatggacactcatggtggtttgttttttttactctttcttaatcatggcatgtaaagttcaattgcaaatttaaggtgaatgagtttagacaaaccaaacttgaggtattggtttctgattggggactaatccaggtttgcagtagatgacacaattgaaggctcattagaaatgttacatacaaaaacactgctgtttatcaaatgaagttgaggggctggtcattcctatcagttctttttatggggttttggagctggtatttcataattaacttgcacgggttcattgtcaaattatagaaccttattaatcagagcttagctcgaagagttaatgaatatgtataggtttataatggagcacgctgtggtttgcattttctttttcgctctctgaagtgttttggtttgcacagtgttgacatcagtagcattagcttttgttttgacaaatgtgacatcatttatttgcttacattaacataactctaatccatttcaaggaagttcctgaacattatctatacggtttgtactcattcaagatgttaatatgctctcctctgccttgctacagggaggaagtatttggcccagtggcacctctgttgcggttcaaaactgaggaagaagctatcttgatggctaataacacaaaagcaggttctttcatctgcctttcatgcatacattcccacatatttatcttttttgtttcctcattactatcatttaacttgcatttaacaaatatattgattatctgagagtattacagatgaagtatgcaatgtactccttaacccagtttcgttactattgtctgtctgttgtcttggtaaacagactgatggtcaattgtaataacaggattctagctcatcttttccggtaaacaatgcagggttagctgcatatatcttcacaaacaatgttcagcgttcatggcgtgtcactgaagctcttgagtatggacttgttggtgtcaatgaaggactaatttcaacagaggtgggactcatcctgtgatccccattggaaaccatagattggcttcttaaaacttacaaaatgtctgttgcaaaacaggtagctccatttggaggacttaagcaatctggtcttggacgggaaggctccaagtatggaatggatgaatatttggaggtaaagtaagattacttttaatgcatcttaggaacccccgttttttagggttttcaacctgtgtttatgtgcgcgagagatgatctacttgttatacccctggtttccaattccctaaagatcacctcttttactgccataacgaggtactcttgcatgccgtgcagatgaaatatgtctgcttaggcgacatgaacagaaaatgaggttcaaggtttgtacatatcaccaattgcctgctctatctggaatctgcctttaaacttaaattttcagctaaaatgcttgttgttcggcttactcaggctatcaattcggatcgtaatcataaggtgtgatctggattgcggagagcgtgcagtctcgaccttttgaatctgaagcgttgaagatgaccagcattttgtacgtaaataaatgcaaatttgtaccatctcccagttaaattaatgtgtcatgctgttgtctgttctaaaccctttcatcgagatattttgcttctgggtaatacttgccaacctttttatgcgcaaatggttagtttttcttttcttctggtagtattttctttggtaccatctataattaatgagcctaccaatcttgtttctctatttgcatcggagaaaggagagatacaaggcagagatgtgaaaatctgccacgacttccctctatatctggtgaaaatattattgatagtatgacaagttggaaattacgaggcaactcccttgtatgagtattgagtatatgctgctgtttcttctaatataaagataaagactgtcaaataaatcaatgttttttccatctaaaacaaataccgcttttttttttatataggtattgaactaaggtttcaatttcctcccaagaaaattaagatttcgtttttattaataaaattaaaaaattaatacaaacaattcaactcttccgggtcttaaactctttccccccctttcattttgtacataaaagctgtctcaattaatcgagaaataataggattgatctgtcttcaaattgaaaacgcatgtgccaaggtcactagaggtggtgtttgagaatctgtgctttagaaagtgcttttgatcttaaaagtaaaagaaagaacaccgccatcaaattctaatatcaatataaccaaaagaaaatcacttgattttgagggaagtgattttaccaaattaattcaggaagtgcattcgaaagtagaaaaaaacgtccgttctgaagctcgattcttacaatattgctcgagctgccattgagatgttttttttttttggctcttcaacacttgaaaattcactcagctgaaaattataaaacccttctctaattccaatccatctaataaggctacagtttatagttatacaaaatccaatatcggaaatgtgataattaggagggtagctacaagaacatcgtcgctttagcacatcgtaaagtaaaaggtaaaatcgagtatcaaaatgagagaaagagggggaaatctaagttgagtagacagtcctgtattccaaacaaaaggtgtcttgccgatggaatgtcatatattccgagatcctctactgccagcttactgaccggtcctttctcttctatttttagataaatcctttcaacttcttcttcaccatcatcgtcgtcgtgtatacaggcaaacttcgaagcacatttcaccgttttttgtttgcaatatgcatcagagcaatctgctcttggtgaaatagagagactcaatctcaattccggagattttttggggaatttcgaactccagacattagttttttttttgatttcggttaattagtctacaaatcatttgtggaccatttttttttaattattatttgaggtataaagcattagaacgcagaatgaaacatcccatcaattcccttgggagagcaagatagaaaagacactattctaaagtattataagcgtacataaagacgggcccctcaaattcaccttcaaaggaatatattcattttagagaatatattcattttaaagatgcttgaaactcaagctagcatgccattaaaattaagccaaccatttccccactgttttagaggcttcaagtataatgaactaaaagttagaccttagctttgcttggttatattataaaggtacatatagtgagctaatgtgttagtccaaaaagctaggaatcttccaatctaaacgaaacgccagccttcccatatggatagagagaagccaaaatgtaaagcaagcaaatgcatcgtaattaattaattatagcaaagtgtggtggggggctggccattacggccagcttcgtttacatgcaatggcttgatttggaccaaatcgtatagatgtgatggttgtatgtgtaaattgtatggcttccaaaaagaaaagaaaagaaaaaaacatttgacagtttaactctccatggatacgtgcttgtaagaactctagacagacacgattacaagtctttgagaatgagtttttttttttttgggtgggagaggaatcttcctttgattgtaaaagacgaaagcatctattctgatttattagatttcagttaatagcttccatttcccttttttagatttctcaagacttgctttcctcgcatgggcgggctacatgagaggaagcgcgctaattatttgctttgttttaaaatactgagtggtagattttgtcatgagttggatcgacgtttcaaattttttggagtctaattgcttgttacgaatttagtatatttggttttgaatatgtttgaacgtaagctgcctgtttgttgatgaccatctcaattatttacgagtgatggaattttcaattcatatcgagatctcgcaaaaatcttatagaagcgagtggttttttccccttttcaaaatgaatatggaaacaagataagaaaatccatcaaatatactttttgaatgaatgtttttttatatagtaagtttaattaatattaattgtcattatttttttaatatttaagtatatgtgtcaaaaatatttaaagttaaacattgatatacacttaatatttagttttactatctgatgaatcaatttttttttgcttttacttggactttttttctaaaagaataattaggattgtatagtagttcgataccgttggttttaaccaagcgttaagcctatatatgcatgagcttaaaaaaatcttgggctcgatgattactttgataagtcaaagaaattttactataataaatcataaataatttattcttgcgagtcatgtatattttacttacactttaacctcttctcttataaagagacgaaggaactataaataaactagaaatccttcatgcaaagagttataaaatttggattccccgctacataattattttcaatgttctctaaaatataactgtgttttctctcaaaaagatacctgctagagcttcaaagagtttctagattcatcaacgagatcttttgcagttattaaatactagccaccaactatattagctagagaaaaatggattataatttctcacttttgcctatgtcagttacaagagacaaagaccccacgataagttctctttaatagggcttgttgaaccttcacattctccttcaactattagtcccatatagacaaaaacaaaatagagattataaataaggaattaaaaaaaagagatactcattttaagtatctccattgaattttaaacaataaattttaaaatttgaacaatccatacttattttaaaaagagattaatactaaaacatcaaataattcttaaattcaccatggagatcttttgaccaatatccaccgagtatcttgtataagaagaatgatttagattgctagaacaaaaatataaagtgattattcaaaaataactcttgcttccaagctactttgatttcatattacatttataaaaacatatatttaaattaactgaaagttatttgaactcgtttaaaatttattagaaaagcaactctctttttttccagcggattttcaaaatactcaacaagtaaaatcacatttggacatatgaaaatcaatataaaaataataattgtatattctaccaaatccctaatcttatttgctacacttctttaccatggggagcgtggggcccagtgtcaatttggtggctttgaccctgtgagggagcttttgtttgtgatgcatggtctggatggaagcagaagtgcatgtcaggacaatctttgattccacaaaagggataagaagttgagcccagcaacaaagctttagaggaagagaggtccccaaatcctgtcgtcaaaagctccatgctcgaaaccctagctttatgcattgatactcacttagtcctacaagctggttcctcctcctgtaattctctcatctctaatataattaaactacatttatccccaatgcttaaatccaaaacgcattgtcgaagctcgtttgctatcatcttgttttttgttttttttaatttgttgttagaattttgaggggtgggtggggattaatggtgtagaaccgacactgtttgaacaaaaagaagagggaaaacttagcatggctgatgaaaattttgaaagcaattgatatttatatgaatatccgaaatctaataaataacttaaaaatatctatattttttttatctaataaataatgatattaaaaaattaacccacatatacttattatcatcgctatgtttatattagtatgatttttttgaattaattataacgtaacttcaacacagaaaacccgtcccacagatcatatatatatgtgtgtgtgtgtctatatatatatattaaacttaatcaccacatgaaaggatgtttttaagagatagtaagtgttgatctacgagaagttaaagtacattaagatcatactttgggtttagctactttaaaaaataaacgattttattctgggcggtggggttgaggttgtttcatgtggggcgcgtccttcctaatctttgtcagtgattcactggacgtatagatgaccggaaaagtaataagaactgagatacagcagtactggtaattgcatgagcacacgtgtgaaaaaaatcctcgtcatgctcgtacatctgtagatctaagatattccaacagttatcgtgaagggatcgatcggctggcttgttaaggattttgcctctcttttttagcatttaaaattgaaattctcacgaggatgcatagatagtctatttttaaattaattgtgaagtcgaatttaaggaaaattatatattttaaaaggaaaaaaaaacactgaacgaacaaattaagatatcccacagtaattgtgcaagtagtctatgtgcacaagagaggtttagataagatctaaaactcagcagaatgtcaagataattattattacaaacatataaatcagttcttttggcgggccaaaaagatctagatgcacttcttgcaaagaaagtctaagtaaattcagaatccaggcaggaggataatattaagggtcaattaatacatcctctacctaagatttcaagtcaatctctagctatataattattaaatgcacatggattagatctctcgtgtctttgtaaactatgaacgtatttgagagtgcttttacttgtatatgattttcaaaagtatttttggcttgaaaaaaaaaacaaattaatttttttaatgtttcttatgatttgaatattatgaaatttaaaattaaaaaatatattttcaatcaaatagcatcttataccttgcactatattctaaaacacccacaagggatattatttgtaaacgggatcgaattctaaagttctaaaaaaacaatttttataaatatttcaatcaactatatcttcttccggccggcttaattatagctgaagtcactctaactagacctgggtatcaaagacacaataaattccttggaggtttaacaccatatatttctaataacattaataacaattggataactgtaatatcaagaaatacatacatacatatatatatatatatatatatatatatatatatatatatatatatatatatatatatatcttgacaacaaaaggagaacatttgcaataaaagagctaggtaactacataacccgaaatgacaatcattttgtgccaatatatataagcaagaaaccaggatggagactgtcttaatcatttaaggcatcatcgagacctttttgttggcgatgacataaataaagcctgtcttgtgttcaaaatcatcttggcaattataatcttattggttcataataagctaaaaagtggattgtactacgacacaggagaaatgatgacaggtggccatccatgcacataatgtttagtaagatctaggtttatatgcccgccgagcatgactctttaaaaaaaaaaaaaaagtaaagtacgaaacatagtgtggtcgtcatgattgcgaagagggcctccatttctcatatcttaataccaaaaaagcttcacctagtagaagaataacgctgcaaaaagatttttgacgggattaacaagtggataattattttcaaaagcatatatagctgctaacttgaggttaattagcagttgattacacatttatatttggattgagaaatggaagttaaaagatttgaactagaaatacacgtacacccccaaaacataaagattctcacgctctatctctatgaatgcagatttctctttagagaggacacgatcaagtaattttgcaagggtatttcatcaatttagggtagattgctagctgcggtaacacacagagatagagagagggtatcttttgaaaaagtttgtagggctgcactttaggatagaaactttattttattttaatggtattactatacgttttcttttatgcaaggttaacctgtccccccctccctttgctttctactagtagtctctgtgtgtgtgtgtgtgtgtgtgtgtgagagagagagagagagagagaaatcccaccctctcttcttcttcaaaaacgcaccctattcttccctatttgcatcgcatttgttcttgaatctctttgtattccctgagtctcagagagagagagagagagagagagaaggaaagagagaatgttccataccaagaaaccctcaactatgaattcccatgatagacccatgtgtgttcaaggggactctggtcttgtcctcaccacagaccctaagccccgtctccgctggactgttgagctccatgaacgcttcgttgatgctgttgctcagcttggaggcccagatagtactgaatctcgatctctttgactagctcgatagtctttagttatatttctatgtacgttcctaatttgtttgtgttgatcacttgttcaaatctctaatacgtgttctattgcactgcccccctccccccgcttgatcaaaaaaatttgcagaggccactcccaaaaccatcatgagagtcatgggtgtgaagggtcttacgctttaccacctcaaaagccatcttcaggtttgaatagaacattctttcatccatcttttgcttttctgctgacacctttgcgacattttcgatgtagggctggcttgatttcattcattcttttccttctatatttaattttgcatttctttaacgtttcttttcttttaatttagaaattcagactcggaaagcagccacacaaagatttcaatgatcattcaattaaggatggtaagagagctaagccatctttatatccagggtttttgtttttgtttttgtttttgtttttatccttacggttgttaaaggtggcaaggaaagactcggattcgactccattcctttctttttctgtacacagagagtgctaaaattaatctaaatgcctacctgttctgttttctttttccttgatttgattcttatacatgcacaatgtgatcaaatgatcagatgatttttttcataattttccatggcaagcaggttcggcgttagatcttcaacgaagttctgcatcttcatctggcatgatgagccgcagtatgaatgagtaagtgttgcattcaaaaatatttctttcttaaaccaaacaattacgaattgaacaagcagaagtcatgcaattttcattttcttaattttaaggacaacaatgatgatatataaaaatctcttaagtttctccttttcatttctgtggaatatatgtgtgaaactgtatatagcagtaactcacacatgattgatacgattaggatgcaaatggaggtgcagagaagactgcatgagcaattggaggtaaaacacagatcgattgtttctcaacatctactccaccccattttttttttataatttatttccttaataaagacagtcggtatagactctttttttatgcacatatataaattaattccaggttcaaagacaccttcaattaaggactgaggctcaagggaaatatatacaaagtttgttggagaaagcttgtcaaaccctagcaggtgatcaaaacttggcttcggtaagctataagggaatggggaatcatggaatttctgatatgggtggaatgaaagaatttggcacactgaatttcccagcatttcaagaccttaacatttatgggggtgaccaacttgaccttcaacacaatatggacaggccatcacttgatcatggtttcatgccgaacaacgacaacatttgtttgggaaagaagaggcctagtccttacggtggcagtggcaagagccctttgatttggtcggacgatctgcgtttgcaagatctgggatcggcaccggcgtgtctcgaacctcatgatgatcctttcaaaggtgatcagatccagatggcaccgccatcaatggataggggtactgatctggattccatgtctgacatttatgaaataaagccatcgcatcaaggtgatgcactggatgagaagaaattcgaagcatccgcgaagctaaaaaggccatccccaagaagagccgaaaggatgagccctatgatcaatactggtggcatgccacaaggcagaaactcaccatttggttgaagccgagctatgatctatgtagatgtaagtgacatgacataaattactaagcttgataagtatgagatgtagggtttttggaattgaaagttgctacgtacctatttgttaaattagggtctgctctgggcataacacaacgccatgcgtgcgtggcaaacaatccagtgaaattgttgtgatcaattagcaatatttacattaaacttgtacttaatttggcacttggcttcgtcttgtatccctcgtgcatcttatatttcatggtttggaatacagtgacatattaattaattaacacttaatttagttagtaaataaatttcttggcaactcctttactactatcaatattatttgcttgtaattaactcccaccccatacgtttgttgtcattacatataaaaaagtatgtgactttgttcattttcaaaccatgagaggcatatttaatggaaatttaaggatagaagaaagaaaggcgaattcgatcgtgtccttgaagactcattgaatcttgtactgaacaaaaaatataaaaaaagagatgccactggatttgccattaattattcctggaaaaagaatgagcccccggctttagtttttcaatcaagacccgagcttagaaatgcaggcatgaattctagatcgacaatttgagttcctgaccttcctcaacatggtcgaagaaaacaaactgaaaagacaagacaagaagattttgaagagtactcctcttgcatgcatgcaagttaaattcaccaatatcatcagtactagttatggccccaatttatgtgagaaccctgtgaatttctctggaagcaatgaataattaatccaaaaaaaaaagcaacatcttcctttttttaatgagagaaaaggaaaacaaacaacaccttattaaccagatgctagaccagaccgggctaatgcccgctagaacaataagaaacggcaaacaatatatatatatatatatataaggcaaaagaaaagaaaaaaatcccgaaatttgaataaagtatatgcaatattgatgtaaaactaaaaccacatgaaaaaaatgtgttcatggaggaaccagaacctcaatgcattataacgatacagattatttatgaaattggaaacttcagaattattattttttcctgatgggggctttaaaactctgtagccctgtccaatgtcatgtttggtccttgagggtcaatggtcaagccatcatgcctgttaattactaatccagaaatctttttctaaccgctgcttttaagttagttgctctcagttagttagtcctatcattgcagacaaaaccattggggaaatgaacataagaaataaaaaaaaaatccactatccctgtcaacaaaaacattctagggttttgggaaaaagcgggcttgcaacagaaaaacaatccatttgatctgagtgaatggagagattacataaatggaaactttttttcatgaagaataatatttttcctttgagagaactcgacagggggtatctagctattgcaggttccatttctcctttaattaccactgtgttcctagggcatcaaaaggaagaggacaaattactacagggcagtactctcatcatcattatgttggtatgcattgcatcagcatgacatgaagaaaaacacgcatatcgctttcaccatattctcaagattttgccccaccccacctgatatcaaaccctttttagaactatcatatgatcattatatacatcgacaatgtatatgattttctttaattaattcgtggatcttatggtgtgtgcttttcactgataaattctctaccaatattaaacccggactcaaattctcatcgatcccggtaccatattttcatatattcgtaggcaaactatatattaaccaaaaataatatcaccctttagctatatatcactaggctgttagtgtagctaagatgagaaacatgcagaggtttctttctctttgttgatggcaaaaaagatgtggtgctgctacctttattggttgcagagaaaaaaattagggcacagcaagttgtcaggaaagctccttctctccacacagacacaaagagaaagaagaaaagctaataaagcctaaaggagaggcggaatacaacgcactttcatgagtgcacaaatcgaggaagcttctacctttatgtgtgcagatggaagcgtcttcctggcctcaaaatctgctgcgtgggtacgttctatattacatttacactaatttacatgcataatgtcagtattatgctttatgtggtgttaatgatcataaaataagattatgaatctaccaagaaagaaaataatgagagggtgattggggcacgatttccgaagcaaattaaataattgtttgcatcctggttaaggcaccttggattctgtttagcttcctcatttgtgacgtttgggttcttgctttgagtgtttactagcaaagtgctgactagaagcttcttttgtcccatgtctctcataccttttttcgcatgtagaaaatttgttcgaggagaatgagctggttaaggataaaaataaggtcggagatgtagaggttacgccaaggacattgactgatgtttactgccattcccgctgtaggtttttttgagctcagtttcgctaatcgttgccgaaatataatgtgaataacattaattcgttatgacatttttctagctaggggaattacagtcattatcttcacttagatattgtcaggttattatcaccctgatgtatccatattttaacgaagaaaaaaatagagcccatgtacaactcttcaatcacgaacatctctaattgtttagttttttaaaaataataataataataataataagattggtgtttaattggtgcttacggcaaaatagatagatagatagatagatagatagatacgaaagaagaagagaacaaacatttttggttgaaaaaattaaacggatatataaaaataaaactccatttatgagggttttaaaatgaatcaatgttttttttttttaaaatagaaaatatatggatgacatgtctttcatgtctcaaatgtatatctatcttttgttaactaaatattacctaaagtgatacaaaataaactggaatttaaatgtctatggacaatgacaagggtattaaggaatcatctcatctaaaagtttaaattgttagccgaaactctaaaatatgttttatattattttctaatacacactctcaagtaaaaatcttttaagattgaaacttgtacaaacttacactacgttgtgcttgatttttatcaaatataataggatggtgagttcgaacttgtgaccattggatcaacaaagctctgatatcatgttaagaaatcatcttacctaaaaacttaagttgttaggtgagactccagaatataatttatattattttttaacaaatgagacaatactattttgagatgggcacatgaaaacaagaatagtagttgataatctctcctttagtttaactctctcatataaaatgataatgaaaattgacttgtatatatatccaatggccagtgaatatttatgaaatcaactgctaaactaccatgggaacatggatttaagatagttttgagaatattaagataagtacttaagctcaacaaaaaaaaacacttgcaaacaagcaattatatatatattgtaaaaaaagaagtaagttaggactggtggggtttccttattcaattataaatttatcattgataataaaaagtaaattgtttgacattgaagaagaagaagaaaaggggacgggacattcaataggcttcgcccaaaattagaatgaaaacttctcggagacgctctaaactcgcctatttattcatgggccttacctcgtcaaaatgctcttagtggagctgttttcgttgaacgagctaaagcttatgtaatagaatttctgtttcaaaatacacgacgtcgtaatgggattacctaatgcccccctgtgcttaaagttttcaaactcctaagtgctactttttaaccagcagtacagtccacggcgtaattttttattacaagcaccgcaataactcgtgtaacattaaaatgactaaagttttttttaacataattatttttttcaagaaaaaaataattaggaaaggttgccaaacgctacctaatattcagcatatattggattacacatggcatcaaattatatgtcgggtctgtgaaattccaaaaaaaaaaatcacacatggcagtccacaatgatttgtctcgtgatgaatagtggcgtggagaacaatattttccccatgtattaaccgatcaattggttcatcaagcaaatcccagaactattaaaattagggtcttagggcgagattttttaaatgtaaagatctaactgtaggagtagtaattttaaactactcagtggaaaacattaagtattgaagttgaacaaatatatatatatacttttaaaacacaaatggagaaaaaataataaaatggtgtcgaattttatataaaaattataattcagtgtcgaattatacgtgttagataattccactggttattgtcggaataattcaccgtttaagcttcaacgccccctgtcagcatcattttaatgtttcatatttatggtggatgcatgaagtttcttatgataaatgtcggcgacttttacatcatgtatcacatttctttcttggatttaacaatctatcactctgcctaaattaaatcgaaataaatgcctacaactcaatgattgggctttaaggcccaaaacaggctgagacagtcactaagtggtcacatctcatcaagcccataaaacacatcaggctcttctcagcccattataaaccacaaatactcgcgagtgccagtgagattccttctccgattttcaatttctcggtggcaactcaaaagtagaggtgggaaaaccataacaagcatggatacaatttttcaccttgctatattatagatttaacgcccgataaattaaacatcttattccatcccaagcttgaattagtgattttgttcttcgtggcttgggaaccggttacatactacacttgaagattaaatacaccccccgccaatattgcaattaggtcaaaaacacatagttaatgtgagttaatcatggagaagcatcaaagatatcagcaggagggataaaataatccatggaaagccctggcacgttgaacacgacgtcgtctatccgccatacctcttccattctagtcctactgtgctgcacagacacttcctcgaatcgaaagactgtagcaatggacctcccctgatgagcaattaacacgccatccacgtctctgtagtcgccgatactacttcctatggtggtttcccagtaaatagtttcattttctggagtctgtacccttgttagatgggagtcttccaaatacatcaagaggccacttttttggcaaaaatagccgtatagaacatgcctcagcacctcagctggcccttcgcttctttccattacagcttctcgatcagcagctacttttagaacgaagcagtcatcctcgccaattgttttctcccctaagcactgtgccttggcaaataaattggctgtacactttggatccaggccctggaatacgtaccaccagatgattagttaagtgcacgaagaaaaggtccaggctatatatgatatttagatgcaggacagggtggtactaataacttataatttaagaggtttcatgtttgagctatgataaaaaaaaaactaaggaagcatggcaagatacctgaaatcaaatgaaagaaccacaaatataattcataaatttcaaagaaatcaatgaaatattgtaagctacatcgatccttatcttttcgtttgagattggaggatagatgatttaagtctcgaattactaattagtacaagaacaagggcatgatgaggagggagctacaaatattttggtgcttctatacatgttctacctcagctttgacattataaccttgcaatttcaatataatacaccaaaataaaggaggtacacagtaatatgctttcgtggacataggggtgtttaacactgtattttaaaaacatttttgaaaaaaatgatttttattttatttttattttacttgaaattaattttttttttattttttagatcattttcatgtactaatgttaaaaataattttttaaaaataaaaatatttttttaatatatttttaagcaaaaaatatttttaaaaataatttcaatggaactctcgatgagacaaataatgtcaacaactggaggctagtgattcctctcatgtcatggcaaacaaaggaaacatatacaaattccctagattttaataataataattaaaaaaaaaaaccataattgttcttccacgagtcatgactaatccctagtttttttggtacgaaatagggtttggcccaaaactccaaaggaatgttcctccctccgtcacttggggctagaggcaaaggaagtagccccggacgagatattgggatttcaattttcaagaatgccacgatagtctctaactttgaggctcaccattattccaaaaaaaaaaaaaaggagaaaagagagacggaaattgacgtgggaacggtagaaagtaaacaagaggaagagggggggggggaggcaagaaaagcaggggcgataatgcaataaatcaggtttttattaactaaagtgtcaaaaaaggaaaagtaaagcgcaaagtgatgattacaagctgcagtcccaaaaaatatacgtgtatatgctttgaacacgatcaaagatgacgtcaaaaacaaaatcacgtgccattcctaaccctgtcaataatgcgagtgttcaaaaaaagaaggtaatctgtctggtaaagctcgggacagtttccctatcatgtcagctgcttgtacatagatcctaccatttctcgggattgtgatttacaggtcttcaattttttaaattttctttaaagaaaacttattttgttcttccatctctatccttatatccggtatgtaaattcgattaaagtagattaaaaatatattgcagagtaaaaaacaatgttcctgatcttgtcttatcatcttcaaccaggagaaaaacaaaatatttatcagttcgtacctggattatgcgacgtagagggcgttggggtcccttggcagcatgagtgccgagccaaggagtgtgacgccacacagtcttcccgtcgctgcctgctatgactttattttctccgacaaccaattcaagagaccacatccccggcaacatttgccaaagaacaaagcacccgttttcgccacttctagtccccaagctcttcacattttttcccgaggagatttctgtctcgcaacgaatcatcttcacacttcctgttgagtacatgtttttcatacatttctgttgctttaaacaccctgttgctgccaaatactgctgtatgatataatgcgcggcggaattttcctgtaaaaaaatctgataaaatggagctgccgaattgaaaacaaaaaacaaaatgataattaaggagtgtagaagaacttacaataggggtgtttttaatgtgaatgcgatggatggggtcgttaaccagagggattggagctagagggcagcccagaactccaagtaaaagccttaaatcctgtcttttgaccggaatactcccgtataacggtactgagaaattgtttcctgctgaaagacccttttgcaaccgaaaccattcacgaatcacctcccatgaactttcctttttgttaccttcttcttgcatgtcggggtcgggaccttccagaagtggagttagggtttgtgcgcaccatcgctgcttccttctagctctcgagcccatggtaattgtaaggaaaccaacgttaaagcttagcaagtgaatattgttaaagatgaagaatgggttttaaagttaaagtgaacagaagctatatatatataaagtgatgattattagggttgcaaggaagagacaaaaagggacagcttatctgtccaacggcagctgatggctattattctaatggactaatacagactcgcatgttgcgatgtcttttgctttttttcttcttcttttctttcagactcctcttgtcgtcttacctgtgcaagtattctcttctgtatattttggaaataaatttagctctctccccgatgtctccgtggaccctgtgatcatacctgcattatctcctaattacccttctctccaggggtaatcttccttggaaaatgatatcacaccaccatatacattgtatatattacaatcagtagacacactgcgtacgaaaagcagtgaagtcttaatgattggcccacagcaacatcaacactttatttcattcatttctcgggtgtccattcatctgctactcgtttcctgggacttttctggtatggctgtagccacgtccgcgtgcactcggacgtacgcagataaataatgccggtagggttctgctaacaaggtcactctccctgtttcaaccacctccactgcgcggtacatgaaaatttatttttatatagttaaaaaaaaaactattcgaaatttgagctgtacaccgttcttattactctccttgaatcaaactctttcaaggactcctttgagtattaaatttcgtatttcttgacgctttccatatatatatatatatatatatatatatatatatatatatatatattctgcctatatttagaaaaaaaatattcttatttgttaaataatatgccaatgatgtttaagtactcttcacttttatcgtcgataaaaatcagttcagcataacaactagtgggaggtgttgccagtaaaagtcaaaagcgaacaaactcaagagcattttcatcggtgacggtttgaaagtctatttaatattatttttaaaataaattttgtttggaaatatattaaaataatatttttattttaataaaattattattatatgatctaaaaatactaaaaaacatttaaaatataaaaaataaatatttttaaaacacggtgccaaggattttcttggtatattcaataataataataataataataattttcttcaagaagtggttttaagattttaaatcaagtaattaataaagcaaatattttaaattaccaaactaatcttcattccttgtcatttcatggtaaagccttttgtgatcttttccctttataaattacactccttcggtgactggaattgtttggaaaattcattgaacaaatacgcgagtactcgatcttctccggtcattagatccagagcttacacatggcaattgagattcagtgcaatcactagcttcctggtatcttcttccatggtgataattaaatctgaatttcccagaatgcccccctcgatcgtataatcttgtcaccatgcgataattttccaatagaagaattgtcaaacacaagtctacatagtcatttgcattaattgcacaatttcttcttcttttttttattgacactatcagccaatttataaaccttaaactccagtgatcatgatttatcagtgaatccaaaaaaaaaaaaaaaaaaaactaggatcccacttgcacttattatatttgatgttgaaagtaaaacctaaacttgtcatctgggatccacaaagaggtgagccggatattggatctcaatcaaaaggcaattgattaatgtggtggagagtctgcatcaatggcggtgaggcagatggagtgggatgggtgatcttccaagccaagagctctctttgttttggtgaaaggttgaaacgtaactttcatttgctgggaagtataagcggccgggacataatctgacctcgtaacacatggtaaaatttattcacatggtttcataagattagctactctatcagacaaccatgctagcatcaatgcttgacaaaaatagcgttactttgcactcaagacaatctcgtgagaccaaactctaagacgtacatcacaagtatggttgctcttttatttttattttgattaaatgggtgtccgaacagcttgcgttcaactcgattaatttcatgggttctgaaattaacgatgattctagaaaacaaacatagagatttatcaatagagctgcaccacccagagttagggtgcttatatagtttttttactaaacataaaatattttttaagagcctggcattaggtctacaatggagtcgtaacccgttcctcatgcagatattagaagatgatgcggtgatttagcctccatacctcggtaaagatggaatatgagagacagaaagttacccaagatagcccattcattttgattttgatacgttggcccttcgctatctgatcagcaaactttagaaagattacattaattgggcctgggccacaattgacacttgcccaacaaactagaaacataaaacgcaggcccaagagcctcggcttagcatttcacgacccaccttacaaacccagccagcatgaaacacaaaaacaaaacgacgacgacgaccgcagcttctcgtggagtagcttttgatgacattttttaaggttttttagttttctttaaactccatattttgcaatctctcaaacagtgaatgggcctgggatgagccagccagctcatcgatagtttctgattgggcccttgaatgtagcacgtcagctatcgtcggcttaccggcttcaagttgctttgccggctccctaatacgtggatttactctcgctacgcttcagattcctggcctggtagaaagaagttgctcttcctaacttgtctcgttatgtctacaatgacacttaccactgccttctccaccactgtatgggtgtgttcagttttgagatttactagcggactttttcgctcatcaattggaacgtgtgtattttgagcaattcttcatcataagcagctataatatttttcgaatagaatatgggaaattcatcgtgggtaagctctacaaaatgcgaactcctaaagattctatagcatattttcgaataacatgtccatctggggcttgcccgcctcatcgtttttcgttggctgtatattcggtggatttactatagcctctcttgctctctcgtgatgattacagagaaggtgggcaagagatagcgaggatcggacgagcaagcgtcatggggtttgtatttttcactttaggatacctatccttgccagccattattgcatatatgaacagagttcttcaatgtgttagcgagtctcccagatgggttattcatgcaagggcgcgaggaagaagcagtttcgattctagaagggatagcttcattgaacaacagaaccttaagcttctgcttattaagcttacgtgcctgaggaaattaaaaaactgccagccatgatctttactctgcattggagaccatgttaaacagaagataggttcttaattcagcaagtattagttcttatggtgataggcttcggcaatggaacggtgtgctttggagttaccttcctccttcgtaaccttcataatcgatcgctgcaacatgaagggttcgtttttgggattttctctgctcagtatgttgtttagtatactgtactttgttgaaagcgattttcacagggaaatcagaatgggactagagctggcatcgtaatttgtttggagcattgtatggcctctaatgtgataataaataatacacacaacagagctgttccccacatgcataagaaaaggaagaagaaacaacactatatcttccgtctgtacagctaaatcggtgccttttcctctgtttcttgaataaaatctagatccaattcaacccaaagaaaaaaaatcgcaccgttaacatcttaaatgagtgtttgagattgcagtaatttttatttatcttgatacacaataaattaatatttctttataattttaatgtattaatattaaaaaaataattttaaaaaacacagtgcagcatccttcaaacagactccctcttcgaaaaaggcaaaaacataagagaaaaaagaggcacctccaactgttgtggaatttcttttacatattttattcgcaaatctcatgaactcacatgccaattcagagtaaaattccctgctagctatatgctgtcacgataagtttaacaatggagattccggaagggaaaaaaaaaggtttgtctgtggacactaacagcagatactacgagtcacccaccatttctgtgatcttatccagctctagcgctattccagattgggatggaaacatgaggtgaaaccaacgtagcgctattccagtcttgttaatggtttataatacagcacaattattgcattttaaatattgcccgccatctgtttgacagctttactcaaaatttcggaaacatgataaaaagctgcaagccactgttgttgctggttttaaatgatttgattttgcgatgaggctccctgctgcacgcaaatgggttcttcagactgtataccatattttgcataattaaattcacagatgtgtgccaaaacacgtcaccatcgtaacattctttcctggttttttgaagcatattggtcccgtggagtatgtaaatatatgttaatgggattaaagatattgattgacaaaagacgacgggacagtggaacatgcgtatatggaacctgttcgtggaattaaagacgaaaagaattgattgaaaaaagacggagggtcatgaatggatattgacaaagaaattctttggatcatttacctgacattaaggactttttatctatccggatatatatttcttttggccaataacatgagatgtgttaaaaatatatatatttatcgatgtgggaagaattggaattctatgaacttaaatgctttttaatacttgtttacgttttatattggatttgtgtgatgttagatttgaagtctggagagatgagctctagcctattggcctcggcatacctttcgtatagagagatgaagttatgtttatacaaacttgttttaagataaacatcacaaaaatatctaagaaaaatataatatgtaagctctgtttaaaaatcttgttgtgtgaagaatatatgtttttttattgaaatttctttaatcaatgatgatcaatttgagagcagtgagctagctttcctgagattagcacttgatttaggcacagtgagttctctagaagtataatagaggttatttttaaaagtattttttgtttaaaaatgaattaaaatgacacaagtttgagtttggcagccagcattagtccttgattccttagaaaatttatttttgtataaaacttgcaatgtgattaattattaggtcattttgaaatgtaaacacttcttaagaaggacgtacgttaattaactctaaacttggatgattaatgtatatttgccataggtttactttaaatctatgtcatatattgattttcttttaaaattataatttacaaataccgagacaaatgtcttttgaaagttatttataataatgtttgaatgaatcacaaattaaaaatatctaaattcaattattaaaattgatgtgggataagatccatggtttaatatgggaggagagttgattgtgttgtttatgcaatggtcgataacttggtatgatctggaaaactatatccaaatctctgtaaaataaatatcttgattatttgtataaaattgtgaaagaaaattacctcaatttttgctatgaatgaaatggtttttacgtatattccattgcataaattacatgactgttatataaaatgtttgatgtgaatatctaaattataagatagaagatatttataaagatatgtatggacattatataaaatatcagtattactgctagatctctcatgtcttctaaccagatgtgtttggaaggcttggacttcgaataactggggataaattagtaaacttatccttgacattccaatcttcttttgtccaaggaaatcaataatttactttattagaaaggaaaacaatgtaacggagtattatctggtccaaattcagatattcaagtgtaattaatttattaggcacagcttgtctagcaggaaaaaaaaactagaagtgatggagagctgcgcatggtaccgtaactatgtgccatatcagcaactagatgtgatgccatggattattctagacaacgggtaggttcaatcaaccttcccaccttcacaaacaaattatataatatactagacaatgcccccgcgcttcgccgcgggcggcacaatatttttttcaatgtaaaaaatattaattgtgtatattttttattataatataaatttagctaaaataataaatttgtgcagaattcatgtcaagtgcaagttttttataaaatatatgaatttaaaatcgatataaatttatctgtttagtagtttcaaacgaaataaccagcataaatttatcatcatcattaaaaaagcaagaaaacttggatatctaaattattaagttcactatattaagattagttcattttataattcaatttaaatcaaacaaaaataaaatataaattgtgaaaatatctacaataatcaaataaaaaaaataagttgttaattttctatcaacaaaaaaacgaaaacatagattgaaaattcatcctgacgttattgccattatcattgctatcaaagctaaaattattgctaacattacttccaaaacaattaaaataattaaatttccatgaattttttttaaaaaaaaacaaaagatttttttataaaaaaacaataactaaaattatcattattattgcataaataataaaatcatataatctaaagaacaaataaagaaacaaaaaacaaaaaaaaaaacgaataaagggaaaaatagagtaatattacttttaaaatgatcactggtataaattaaaattttaggaaaatctttaaaaaaaatcaaaagatttttattaaaaaataattactaaaattatcattattattggttcggagattagtgaacaaaaaaacgtataaggaaaaaaacataataataaattggttcggagattagtcatggtgtgtccacgctggcctggataccccgattatcaaaaaacagatttggtccgaggagtagtggtggtgcacttgagctggcccggagatcgtggttataaaaaaaatatataagtgaaaaaaatatataagtgaaaaaaagagcttaagttggctgagagaccatggttacaaaaaaatgtataagcgaaagaaaaaaaaaagtataagcgtgaaagtactgtagcaatccatattgttttttaaaaaattgggcccaagattagtcgtggtgtgcctaagctggtcagagatcccggttataaaaaaaatatataagtgaataaaaaaattataaaaaaaagaaaaaaaatatgggtcccgggattgtcgtggtatgcataagttggcctggacaccctagttatcaaaaaaatttggatatggagattaatcgtggtgcatttaagcgagctcgaacaccccgattattaaaaaacaaaaaaccaaaaaaatataaaagtagaaaaaaaaatatatatatatatatataataagaaaaaatgaaaacaataataagtaaaaaatataaaaaaaaggcaaaaaaaaaaaaaaagcaaaaacggagggaaaaaaaagaagaaaaaaaataaatagaaaaaaaagaagcaaaaacggagggaaaaaaagaagaaaaaagaataattagaaaaaaaaagagacgaaaaaaaagagtaaaaaaagcaaaaaaaaaaactctactgtcgcaatccacagtgcactgtgtctgtgtgcacagtgcactggtgcacagtgcactggtgcacagtaaatgtgggacgccttttattgtttagttaatagataaatatttttcatacagtagttggtatagtctgttttaaaaatattttttaataaaaatatctttcatttttattttatatttttagattatttgaatatgctaatatcaaaaattatttatttatttattaaaaaatattattttaatacattttttgtttgtgtattaagagtgaaattggagagtgttttttttaaagaaatttataaaaatataatatttttttatctcaatacgccaaaacactaagaatattaatttaatattttttttttaaaaagaaatacttcaaagtaaattcaaactcaaacatagatgagcttctcattgaccattcaaaaaactcctataaaaacccctccctccctcttctaagcctgaacccataagactaaggtataattgagtgatagcaactaaagtatggcagattcaacaccacttcttctctctcggtcggagtcttcaaatgagtcaaaacagcctcctccctcccttgatgaaaccattgagcactgtattggagagttcggtgtggcccaactcttccaagccatcctcgtgtcgtttgcatgggtgtttgatgcacagcaaacattcattagtgtcttcactgatgccgagccaacatggcactgcaccagtgattcatgcacttcagcctccgacatttgccgtcttcctcaaaattcatgggcttgggataaccctaatgacacgtcaatcatatcagaatggggacttcaatgtgctagttcaataatcagaggcctgcccgcatcttcatttttcatggggtgcctcattggaggactcatgctagccacgcttgctgattccatgcttggtcgaaagaacttgctgtttctatcatgcctggtgatgtcgttctctggatcattcaccatcttctccaacaacatatggacctactcggccttgaaattcgttaatggattcggccgtgcaacaattggaacgtgcgcccttgtgctatcaactgagcttgtagggaaacgttggcggagtcaggtaggagttattggtttcttttgtttcacgctagggtttttaacattaccagctttcgcatatgtaaatagaggttcctcctggagaaatctttatctatggacttctgtaccaacaattttctactccatatcagttcatttcttagtccgagagtctccgagatggctgtttgttcgcggacgtaaggatgaagctgtgtctatactgaagagtattgcaacggctgggagcagcggcatcctcatgagcttctcgaacttagaattaaggaaagagtcatggaatgtcgatacttattcagcaatcaagattctcttgaagaagaagtgggcttgcagaagacttctgacagtcatggcagtggtatttggtattggattggtgtattacggcatgccactaggccttgcaaatttgtcattcaatctctacctgagcgtcacattcaatgccttgtccgagctaccagcctcattggtgacattcttcctcgtagacaagctgaacagaaaggattctctcctcgttttcaccactctaagtggtgtttgtagcatcctctccgtcgtgacgggcgagagatctgcgaacctgcaaatggggctggagctggtgtctttcttcagtgcatgcactgcattcaacatctcgttgatatacacactcgagctatttcctacatgcgtgaggaactcggcaatatcaatggctagacaatctcttgtgttcggcggcatgttcagtccagttctggtggcggcaggaagcagaaacaggtttctgtcgtatgggatattcgggatggtgatagggatttgcgggctgtttgtgatatgcttgccggagacgaggggcaaaacaatctgtgacaccatggacgaagaagagtacaatagcacaaagattgatctacctgtggtggggtgactcgcatgcatctggaattaaaattggttttcgtgatgtttgctggcttaatggcaggtggtctctgagaagattccacgtgtataatttcgtcttgttcgtcgagcaaatggccattattgaaatgatatttgtcatatatggaatataaaatatattgctgctcttgccttatgggcatgatcaaaacttttggctggtaattacagaaaagtagtcatcattgagaattaaatacaaaatctcacaagagagttttaaaaaaggtggcgattttctttataaagtactgaagcttatctcctcgacgagcagccgtcacatggccaaaaaaagacaccgcaacttaatcttttcttatctgtttgctttcgtcatccagtcgaccactgtcagactataaaatatctccggtgtggagggcagggttctcgttccaacctgcagtataatcgtggatgactgagtttctttatcgtttgattattatttaaaaataatatgtttttgattttcttaacaccaacatattaaaaatatctaaatattttatttgatatattttaaaacaaaaaatatttaaaaaaccatataaaaacagtcacaacaaggccagcactgtggaaattatttgatattataatagtgattgtttttcattgtttggaaatgcatttaaaaaataaaattatttttgatattaaatgtctgaaaatactataaaaatgaaaaaatcaaattttataaaatgttttcggacagcaagagtgccgtggtgggaggtggagaatgaagaatgtcatgaggtccactaaacatgggccctcatttcaagtcctctggatacacgggcctggtctgttggaccgttatttaatcttccacgggcttgctccgtttgtgggcttccgctttcacatttaaacttgtccgcttaagaatttacactctctatataatctgaggtcatgaatctattatttaccactcacatatctaatatcttaaaatacaaataatttcagtaactcttcgatcatgtctggtaccgtggaatttgtggactaggaaaaatatcttcacttcgctcgtaaacatagatattaaatcggacttgtatggtgagctaatttgatctgattataagtgtacgttgatcggcattagcgttaactgaaaaacaaaatagcatgtttaagattttaatatatgtaaattttaaaattttaaaaataatttatatgaatatataaatatatgctataaaaatataaagtgtaatgcatttatttcatataaaaaatttgaaacacaattcatgtgtatgtatattatatatatatagttgtcttgcatcagaaaactaaaaaaataatgtatatggacgtagtcacatttaattattatttcacattgagaaattaaaaaataatgcacgtgcaagattatatatataaattatatgccacgctaaaaatatctgcaagaaatgtgaaacatgttcgttgaaggggtgtggattaatagtgttggttgcccacctaaaatgactagcatgtatatatatatatgtaatgaaaattaaaattatcagaccttccattaaatgacaactttatcctttcaatgacaaatttatcccttttattcattattttagattatttaattttttttatcttatattatatataagaatctagatcttatatgtagatctacgcggtcacctttcaacataaattttccttacttgccaaagtttttctactttcaaataaagattttgtggttgtttttagctgaatgtagggtatcaatatactcaatgaaaacatctggaaatgagtactaaagtaccgtgaggtgacatactcaatgaaaacacctctttttttttttcaagtcttgataattgaatcccaccttcacatattatttatttattctgttctatttgattatgatattgatccggaaacattgggtcccacaagtctccttgctgtaattattttttacacatttattaaacatcatttgatccattttgccatgcaactattttcttccaacacataacctgtcatcttcctatctcgaaccaaacagaatgtaagtttatatttgggacgaggataaaggaggtgagaagttgtccgtttaatttttacatttcttttcctgtacttaagtttggtacctaggtttggggggggaggttaactggcatagtaggcctctaaaagtatatttattagtattgaaaccactgattttatatatataaaaagcctatcggggagagaagtttgttttattttatttttacaagcaatcaggactcctgtttcttagccgatagaagatgatgattttattacaaccttctaagtaggtggcttaaatagttgcacatgactaataacattttcatgaatagtctcaccaatgagatgcatgtgtctatattcatgtatcgtactcgtcaagagttattattttactagaatcatataatgagttttgtcatttaaaaagcatatcttgagaagatttgtttcttgtgcttacaaacaaattatcttatagtataagtgggttcttacgataaaattccaggaaagactatgatagtagctgatgatttgcttttaagaaacaatgaaggagcaaaaagaaaattagttctacctctgcaaatctctctcccaaatgctgatcttatacgtgatgtatatcattttcgataaaatctcacaactcttttcgaaccttaaattctaaaaattaaaaacttcaaaggtatgtgtgtcgatctgggtgtgattgttacatgccaaactggttccatctatgcacaatatttgatttagtcttaattgtcgaaatcttatacagctcgtaaaagcaaattagtcaagtcattgaagattaacgtgaccacctagctctatgtttaagtatagaggaggctggtctttgaagtggaatcttctttgtccacaaccacacttcatttgcaaagctttcttgagcacaatggttgaaaaactgttatttttgcctataaactaatgcacagtctactcgtaatatatatatatatatatatagcactatttctttgtctaattaaactctgtttaatattgtgtttcaaaagtgattttgaaaaaaaaatattttgaattaaaaaatagtgtttttaaatcgttttcatatgctaatatcaaaaataatttttaaaaaataaaaaatatcattgtgatgcatttctgaataaaaaatatttttaaaaacaacttcaactatactccttaatatgtataagttgctttcgaggttgtagacctcactccatgcacatcgctgttgattaaatttatttcatcaatcgactgcgaaaggagaggattttatatattaaaaaggagaaatgatgactaagaaaaccataaaacagcattcttgctggtgttatttgcttggaaaaattactaatcattgttacaagaaaagcgttttagaaaatcaggaaagccatatcacgactaatcaatgcttactaattaaactttccatgacagccatatacattatcgagaacaatcaagccagctctgagtaacgttgaagatagaactctctgtgggatttgagtcttagatgatgactaatgtaagagataaacttacaaaccagctaagttaatcccttaaaaaatcaattgctgatgaatggatgcagtataattattttatgaatccctattagggttttataatttagtcaagtttcttggaagatagctagctaggtgacacagcaaagatagcatttttaattaggaccacaggaagaagtgtcgtgtatatgttttgttttagttgttttattattttttatgtgtgggattacgatcgcttcatttgaagagaacttgtgttgcgggaaaacactacttaataccaaaacaaataatttgaagaaaaacgaaaagatacttaatcattcaatttttatatatatatatttttttaaaatgatcgtgactgctgtataagttttttaagtatttttatttaaaaatatatcaaaaaatattatttttaaactttttaaaatttattttttatacacatcaaaataatttaaaatatttatcgaatccaaaaacgattaatcgattacactcatcatatcccatcaagctcgtaaaaaggaaatacaagattgcggctatgacatgaaaaagaaaggattcaatatatcgaagctctcaaccaattaggaaaattaacctaaaataaaggcatcgctattaatgtactatagcgttgtaaacattaaacgcgtaactggaaaccatggttgattcctagtttggctataagctagggctgtttgtttttcaccacgtaggacggtgaacattgcagtgaaaacactatttgtttaaaaatggaatatatatatattcccctttaaattaatagttttttttgtcttatcttgacatacagatataaaaaataaatataagtaatattttgttgttctttgagagaaaaacactatgaaacacagtttctaccgtactcttactcttaaaaaaacatttagtttaaaagcgtggtcaagattataataataaaaattgttttttaaagtgtttattacttgaaaacacaccaacttgtttttttaaaagaataatatcaactcataagaaacaaaaaaataattaatataaaaaaatcaaatatttataaaaatacagtgtaagaacctagtgaagcaacaaatactgaaaaaacgacaaaatatacagtgtgcaaagatattaacgtttgcttgagaagttaatgtagggcctggaaaagaaaatcatatgaagaaaacatgttttgttcattataggactccgtgaaaatgtaacgagatgatggaagagcgatgaccgaagaggagaaggacaccaacgcactcaattagacgtagggcccatgagtgccccttaagtttaaatcgcagcacattttcgacttctaggttcttttgctgaattgttcaaaggacagctcctcctgcctgctgactattctaaccagatgaatgccaacaagtaaccatatataatacctgccggcttgccagagatactttaacgacttgatagtcgggctgaaattattttttaaactattttttatttataaaaatattacaatgatttttttttcaattttttttaatatcagtatatcaaaataatttaaaaatatataaaaataataatttacaataaaaattaaaaaaactcaattttttttaaaaaaacataattacatacagggtgggtgttagtctttctttcttgcagtatcttctagccattcaaacttggaagcttttatcacaacgtaaattgaaaacgtaaattgaaaaatgagtttttatttatataaaaaacaattttaattaaaatagtaattcaactaaccacatccaaaccacgtgtcgatttatctatcagtcttaagactaggaaatgcatggaccgctaattaacctcccaaaatgtgttagcgaagcgcatttaaatggacaaccctccatactaccgtgtgtttcaatttgccaggtgggggcgctaatatatatataaaatattttgttaatattaaaataatttaaaaattaattacaataaataaatatattagaagaatgtcacaatataatttttgtctcgcaattctaattttgttttaaatgatattttacgattgttcggggatcacaaaggccttcagatatagatttagtttgggatgaaattacaagtagtttggtgggagaataaaaacaagtgtctaatttacttgaattattaatcatattttttttattataattattaaatatttaaaaaacaatatatatatatatatatatatatatatatatatatatattgcacgcgcgtgttctgtaattcttgcaccctatattgctcggaaattaatgcacttgtcagtcgccgtatttaatttccctctaccttagcttgttattccctcaggatcgggtagatgtaagaacaggtcgtgcctagctaactaaaaaataatcctgtgcgcggggctgcatactagtagcagccaaacacatcggatataaattgaggactttcaggggagaggagtgatgagattagtccctcgacattttatatatgttgaggtagctagctagttgaaggatgcaggagtagccagccagctgaatcagctgaagaagggagtagtggagaatatatagagatgggccacaggtgctgcaacaaacagaaagttagaagagggctgtggtctcctgaagaagatgagaagcttgtcgaatacatcaccactcgcgatcatggaagctggagttctgtccctaaatctgcaggtatgcacgtgcgtgttgtttttgcttgcatcagagatcaaaatcaagccgtctgatctgtgcttgcaggtttgaaaaggtgcggtaagagttgccggttgaggtggctcaactacctgagaccagagctcaagaggggttccttttctgcgctggaagaacaggtcatcatagatgttcatagaattctgggcaacaggtaaggattattcgagtcaaattaaataaggaagtactgtataaaaaggtagaaaaaatgaaaaataaataaataaaacactgtttctaacaatggggaaagtagtctgattatatattttttcactgcattttgatttacaagctagaactttatactgcttctaacaggtgggctcagatattgtaagaattcgaacttcgattaatttcagtatatacaattgattgtttgttgctgttacatttggggaattatataggaaataattacaatacatttttagctaaaatacaatacatgtttaaactaccaaaaaatcaattatcctattatagtaataaacggctatatggacataacggctatatttcaacactccccctcaagttggagcatagatatttatcatgtccaacttgttaattgcaccatgaaatgctcttcctgaaactgcctttgtgagagtatcgccatttcactgcaatgagaacacaccaacccagttgcattttttattttcggtcaactcgaccagcctttaaatctcgtccccctccttcaaactgcgctaccttatcgaatgtaaaatttcctgatggtgatctccccctgattaacagggtgaatatcttcgatggtgatctccctctgattaacagggtgtggagtcacggaatattttcgggatggtgatctccccctgattaacagggtgtggagtcacgtaatatcttcgggattcactgaatatcttcgatggtgatctccccctgattaacagggagtggagtcacgggatatcttcgatggtgatctccccctgattaacagggtgtggagtcacgggatatctttgatggtgatctccccctgattaacagggtgtggagtcacggaatatcttcgggatggtgatctcctcctgattaacagggaatggagtcacgtaatatcttcgggattcacggaatatcttcgatggtgatctccccctgattaacagggtgtggagtcacagaatatcttcgatgaggatccccccctgattaacagggtgtggagtctcggaatatcttcgttctcttcattgttactctccccctgaagagaaggtccgggaactccccctgattaacagggtgtgtggagtctcggaatgattcattctcttcatcctgatggtgatctactgttagtctgatttcctcgtttaacactaccaataatctctcgggttagaatgtcctgaaaaaacacaaaagagaggccaaaaagtgacagtgcatgcaaggataaaagtaatttgacttactgacaagagattgtatacaagagatggaccaatgagaacaatatctatagttacataatcggtcaaggttatagacccttccctcgtaataagagagggtttcaagaaccttaaatttccggaatccctggtcatattatcagatgcgcctatatcaataattcaaaggattatttttaataatgacagagtttgcagaagttttaccaattgtgtctggatgaacaacattcatcgtagattgtacctgttcagttttcataaaatttactatacctttgccgatatttttccgggttttttcataaaatctcaccagtcaagtagtcaataatttcgtagcatctttgtttcgagtgacccgattcgccgcaataattaaataacaaccgtttcaagataacaaattcgagataaaaaaatacgtttcaagataaaaaatttgagattcgctcggatcaatatgattcaaagaaatacgatttaaaggaaaaaaaattgagattcgagataaaaaatacgtttcaagaaaaaaaattcgagattcgagatacaaaatacgtttcaagataaaaacgtcgagattcgagatacaaaatacgtttcaagataaaaaaaaaaaaattaagattcgagatacaaaatacgtttcaagataaaaaaaattcaagattcgagatacaaaataagtttcaagataaaaaatgcagaagttgtaggtgtaccattattgtttcgaatgacccgcttcaccgcaataaaaaacaaaccagcctacccgggttcttataaccggaattaaacctttgcctttcactttcatttctctcatctctgtgacccatctgtctctcacccggtttcttataacccgaagtaaacatctgcatctcacttttatttctctcatttccagccttgaactctgcctcatcacttctccacccgttcatttcgaccctttttctgttcaaattcgttgacgagctccgattctcaaatacgtttgcctgttcggcctttttttcttcagcggcagtttcagcttcagctttccttcgagcctcgtcagcagccttagctcctgcctgcacccgagcttttccttccttttgccttcttgctaattcctcaggatcacgcttttcacccttttcaatttccttttctcgagctttaagtatggtgtcagcaaaacggttcttcaacaaaggtgcacgatagagcttatcgggagagacttgcctctcaggtggagcactctcccctgtatcaatgcctgatgtgcaggttaccctttctggttgtttctggtttgtggtgtttgtgatgagaaatctgggtttgtggtgtttgtttctgtttttttttcgttttcttttgtgtgttgagaaatgaagggaggatgtctgtgtgtatgaattgatggaatttctgggtttgtggttttttttccggggaaaatgtggcttttcgggaaaatgtggcttttccgggaaaatctgggtttttctgggtttttactgtggggatcgatgggttatttttctgggttgtttgtgtatgaacagtgtttgatgaacaagcactgtgcagattgaggtctgggtttcgaaccagaagagagagaaaaaatgcagtaattcgatttcaaagaaaaattcgagatttgctctgataccatgtaagaattcgaacttcgattaatttcagtatatacaattgattgtttgttgctgttacatttggggaattatataggaaataattacaatacatttttagctaaaatacaatacannnnnnncatttttagctaaaatacaatacatgtttaaactaccaaaaaatcaattatcctattatagtaataaacggctatatggacataacggctatatttcaacagatatcgaaacatctcccaggaaggacagataacgaggtgaagaatttctggaactcgcgcttgaagaaaaagctcatggcacaaggcctggacccgaaaactcacaacttgattcctactcgccagagggcagctaataaggttgcatgcagcatgtcaccatctaaccacgaacccttttcaattacctcccatgattcaaagatgaaagatgtttccttggagataattaaacctcctaaaataacactagtttcacctaattatgcttctaattgcagcgcccagcctccattttttcaaacaacaacgagcttgcccttgcccaaatcttgttacgataaccctagtgtcatttggaatgcaaattctcaaaattcttatgattcatcccttttcacctgcgtgtcatccattgagaactcactcgcttcctcttcgtcctcgtcttcagcgaacccaactgggtttggtctcgtggatgaaaactgcttttggagttgtagtgacattgttgagccctttgaagccgcaaaaatattcgaaagtgtgccgccacaagatcaagaaaaccagctgaacaaggtttgtgacacccaaatcgtgggtaagaataaaggagttcatgacaatatggaagcttcattcgacacctctagctatgatcttgggttggtcgactccacattatttcctggttcattgtgtcatgatcttagctcaatggatgatcttgcatggaacttttaggcctccatatatatgcgtgtatgtacctcgtgctactgtaatagatagctggttttgctgaggttgtgcatcccaaatatttgaaaggaaaaaatgctcttaaaataatacaataagaacacgaacaaaaaaataaacctgtgagtgtcagcaaaaaaatgttttttattgttcgattcaattttacatgtactagtatatataccatcctttctttattgatcattattacattataaagtttgttatataaacacctgatgattttttattttattttcatatgatgagataaagatatttatagatatcttttgtttatagaaaataagttatgttttataaataaaaaaaaaacttctaaaatagttttattatttaaaaaagaaagcttccatttctttctagaatttcgggagtgaagttattcgtgatatgaattaattcccatttcatctaaatttgggaagctgctctcggatgttgagtcattgatagccatcgcctgaatcaatttctccccccgcatgttcaccaccatcccttgagttttgatggtatgagaacattttgattaagcctaattctatagttgcctctttatccgtgttcatccatcagttgtgtttttatattttcaattcaatcaatttatccttataaaaccacataaaaatatatagatatgagttgatgctgagagagtgtatactagacggtgataatgatggttgatattttatattaaaaaatatttttattatatttaattgaagtgaaatttaatcttgtattgccaaagatcgtcagatagtgttaatgaaaaaaaattaaaaaatcatttttcttatttacatttagcatccgtaaatacaaatatttgaggtctagtaggtagatggcaacttaactgggccttcagcttactccccaggccactacctgatagatcggttctaatcacctaacccgtgatgattgtggtgccaaagttaccaccagggcccacaataacacagccatcataaggcccattatttcgttaatttgatctgggccatataactttctttcttttctggttccaaagggcccattatttcgttgatttgatctggcccatatcactttctttcttttctggttccataggcttgtaggcggaagcagtccgcatggccatggcttctctttcggcattaagagatataactaaatgatacgagtctccgacctcccacgtccagtatatcccccctttcgccattttagccaaagcttcgaccttcttttctcttctcttctcttcttcttctttttggccgttacatatccagtagctttattgaaaaacagttggtggcgatttagctcggcatcaagactattattttttattttggttgaataagcaacttaattatcagctctcaacggtgtaaaattatggagtccccaaagttactgtgtgagcattgtgggctcacatcatgattctttataacagagaattcttttgtgcttttactttggcagaaacaattggttatgtaattccacagagaaatggagacaatctctttccaaatattggcccagaagtttcaacaattccatgaaaaaagaaaataacagaaaaggaaatgatcttgtagccaagcctgatcatcatgtggttggcaaaacaatccccgtttttttttttatatatatatatataacccatcacaatatatcctaccttcgtgtcaaatgaattttagcagtgatacaatgtctgcaaggaacattttcttaagaaaaaaatctttgttactttgtggtcatcctaactggccggtggctcttagtattgcatggggagtgcagtattggagtcataagtagaaattttcttcaaatatcccgttcatgcaatccctgtacatcatgtagtcgtcgattatttcaggctttgatggctccattccgtccgtgaaaccaatctgtgggaaatccttaagttctaaaggtgggaacggaaattgatactgcaagctcgagcagtttggcatctgcatatcctgcatccacaatatgttgtgtgattaataatcggcctcataccgagagagaattcagcggggaggtggagaaagcaactccacctccttttgaagattattgttgagtaattaaattaaaaatgtaagcccagcaacatgttttgaattggagatgatttcaaaatgtgtttcaagtgggggaacatgtgcattggaagtagtgataattgtggtgtcacatagagtagacccagagagaaaaatcaggaagaaagatgtttgaactttgaattatgttcgagtcagtcaaaagaagttattgaagatggtgaaaagaaagctagttggagtcagtgagagagatttttagaaggaagctttaggaaaagacagggagtttcatggctttcaacttaagatcaaaagaaagaaagaaactcaaagggcttgtgtcgtgggccattcccagcacatgctggccccaggattgtactttcattctctgcgtgaagcacagccacgtggtattttccctggtgtgaacatgaagctctcgcaacagggcagaatatcgatggaaatgtggtgctagcaaaagagatgatcagaaaaggatgagttggagaagatgattgttgcatgtggatctaggcgtggcccatgccatcaatggcctgatgtttttctactgtctttccatgtcacacccatctagacatattctatatgcagtagttacctacatatttagttattattaattactattttttggaccgacattaactatttatcgaaagatcatcaagccatcaaaaaactaaaaccaacgtgtaaaaggagccttgtttaacgaaccagaattattatgtcataaaaagtaacagtacctgaattagatttgacgagaaatccacgcccatggaataaaggctagctgaactaatggcctcatcggagggaaacggaggttgtaaatcatcgggcatcgcagtttcaatcggagtcccttgagtgacatcggaggaagatgtttccgatggaaatttacagtagccattgttgaaattttcatctcgatgatcagcattatctctccctttagaactttcaatgccgctaactgtgtcgtcccctaataattgcacttctgatgataccgccgccgcatccttctccttatcatttccattattttcttcttctttcggttttggaatatgtattgttttcttgaaaacacggcataatgcgtaggaatcctgtggtgcgcgcaagaagagccagaacttgttaaagaggcagtgacaaagatctgtaaaagcaagatcacaaagagcagaaaaagaaacaagaaaccaagcaaagatagcgcaagtacaagtaaagtcactaaacaaagactctttcatcatcatatatgttgatgataaggtattctttattaaagagagataacatttagtaggaaaaggaagatctaaaaatgatttgttggtgtacaaaaacaagagcaaatgtgacaagatctctgctctatatatgtgtttgcatatctgtcatataaagaagcataatcctgtatataatatgctcttaaaaatattaatgtttttctaaatcatttgattatttgaactgaaatcaagaatctacttggagtagtaaaaattaatattaaaattaattaattagacatggaccactttacattcatcttccttgctagtactagggtttcctgtgagaccaagaactctgatcttgcagccgcgtgtgaatcctattgaaatatatatcttctacacaatcaaacacgtacggctgtctttttgtaaaccctaattaatagcctctcactactggtctacatatgaatgccaccaaaaccaccagatcgatggggcagatccagctaattcaccatgatattgcatggctcattgttcataattaattcacctacatgacatttctggacataattaattatgcaatgggttaaaattgtgtccctacttgattaaacttctgtgcatgcatcaaatagaaatcgtgccgtaattaagtgcaatatatacctttaaacttgatgatgcggcgccgcacaatgatgagtcgatcaagcgatactcgtgcattacccagttggttctgatgccatggggagctctacctctatagtacaccaatgtcttcttcatgccaaccggccgcttctgcgagctcaccggtctgtctttccctgtggctttccagtaaccagcttttgttgccctgttcgttcttgacccattagggtatttcttgtccctggggcttaaaaaataccactccagatccttgctcggtaaaaacgacttctctgttgatcgaatcatcacagaaaaaagaaaagaaaaagttgtcaggtgcatatatgaggtgatgctgaataatattgatgatgtcggtatggccggagctaattacatctgtaaagcatttacctggcaagtcccatggctcacatttatagagatccacctccgggataatttcaagctcaactgtgcggccgttgatttttctatcgagatagtaaacaacgagctcttcatcagttggatggaacctgaatccaggagggaggctcaccggcgccattgctgctgtgacagtaattgcagagaggtggcgggggggagaggtggcgggggggagaggtggcgggggagagaggtggcgggggggagagctaggggagggcgccaagctgatcgaagaacgtctggatcgaggatagcatgttagtagtaatataggacaccgttttgttatgacagagatggttgcattaactagcccttcaacttctctgtatattacgttgctgccattcactcgagagacctgacatctttaatcaaacccccctgtccctcccttgctacacctatcaggaaattaaaaaatgtttttagttaatttagaagaggaatattgtggtgtgaacagaatggttagatttggtattttatgttttgataaaatgaatttgggagacgacacaacaggtccttcgacttttgaggattctgtgtgaaaaccatcggggaggacaaggaggttccctgcttttgtctgctcacaaactggcaaaaatcagaggacccctcgaacgaatgtggggcccagctggaccgtccattccatagtccataccctacagcacgcaataccaggcctccccttcttattttaataaacaccactgtattataatgatttatctttcaatttttttttcataaatgtgtttttgtattgttttcgatatattaatgttaaaaatatatattagagagcataaaaatattttaatacatttataaataaatggaagacgttttgaaaacaaccactgtcgtgataataaaaaataaataaaaaagagagggtggcagtcagttagtagcgtaaaagaatctgatcgggaacaggatgatcatgtgccatttaccaaaaagcaacgtgatgaccacctcatgttctctgttgccttggatgcatacagtgagatggtgtgttttttgtaagtttcttcaaacgttgatttcttttttcttttcttttttatttaatcgatgatttttttaatagtaatgttaaatctcttgagtgttgcagctggaaattatgatatattcagccgtgaaatctctcttaaatattttaaaacggcaaccatcaacttagatatttcatagcacgtgaattgtgctatttaatgtttcatcacatttttcttaatttcattttaagttatttaaaactttaatgaaatggatgtttatgatctttaataatttatcattaaaaaaactccaataatcaactcttaaaagatggcaattctcttattgaaaggcagaagtgtgtatatatatatatatatatatatatatagtctaaatatgatatgtatattaattatgcaatttaggcactatatatattgtgatttgctgcatggatatacatttctataggtgttaattgtatatttaatgaattcacacttctagttaaaaatacgattaactgatcatggttttctttatgcatcctggttaataattaacagttgttaataaaaacacgattcgacttgtgatttatttatttatttattttgatggtccaaatgtgaatgcctttaatttaatgtgaatttgatgggccatgagatgggcccgtttgaaaattctctggccttcttttatttccagatagaaaggaacacttttatcattcaacagtttgatgaattgaagggggccgtaatcatcatctgagaagatctacctggcacaccgtcacagcctagagccctagactctctttttctttttgttatttttcgctttcttttcctgccatccaaacgacttgtcctttactgttttattctgtttcatcttcccttccctttgattcctttcctttccttaaaatatcatttccatatgagtaaagacacacttcctcctttaatgattacagacccaaaatctttgactgcggtctggtctctctcttctctctcacgcgccaccgcaatattatcgatcgatgcaatcttatacatataccagctattcccccatcaaaatatatagcgcgagggtacgttctgcatgcatatacactcttaataactccacagctaaccatttaaaattttaaagcgcataaaaacagcatattatctaagctatttcttccggtcgacggtaaaatcgtacttgatcggtaatttatagatgggcagacccgaatgaccctctagtttcgaggcccaccggagaaaacaagtagtatatatttatcaaaacggaagttactaactttgttaatttagggttcctttcttttgtttggatgagtctttatggtagttacgctcaaaggtggatgtaaatatttgaatcaatctctgtgcaagacaattacatcgagaaagagagaggtgtggggtttcaaggggtttgccgaaagatccttttacattctttactggctagccgcactccacgatattattcaccacgtaatattgtagcatagatacagtactagctagcttcaccctgtgtatgaatcaacatgcatgaagaagaagctttggattagcgtaaaagagattccgagttcttctttttcaccaatgggattgcaaaaacatggtggctaggcgctcctacttgtaaaagaaaaggaaaaagcaacttgatccgtcaagctcgaactagaagtagtgcccacattttgattctcctatgcagttgcataacttgcattctttattaattaataatttaatctagctgtgtttctttattttagttgattttccctttctcaagaatgatagacactagccagtggtgttcttatgttaaatgggctctaaagccatgcaacctttcacacgatctgagtgaagtaaagcaatggaaaacacaagagatcatgcatggatcgatgcctgggtactgtgatccattaatgtagctgtagatcgatgacacgtggtcagctctccataaagaagagaaagagattctaaaatgtcggctcgatattatatatctctagatgccatttcagtctgtgcatgcaaaagacaaatgttcagatccttcttccattacacgtaacatatacgaggtgtagcttttatggtatagctgctgggttgcctccagttcctgagggcacgaatgtcatttggacattagtttctgacttggcatgcagtagctttgaaagcatcgtcatgacctcctcgtccatccttttctcccgtgcccaggagcagccctttgctgaactaggaccacgcctgtcagcactggtgggatttgaaagggaccattttcattaattcttccataagaagcagcagctgcttctagtcaagaaagaatatgtatggcgagtggacaagcaatctagtcagtgtaatgatctcttgcaactataacgagaacctagctagctactcgaaaaatctggtcattctcggactgtagctaactagctgttctggagtagaagaattaacccccgacaaacaaaaatacattattcctcagcaaataaataaaatgcagtgctgcacaagcacgataagatttttcattccagggaaatcaaattgatataaaacaaatagtgaaggtgaaaaaagatagcttccacagtctattttcttattctgaaatgtttttttgatgggtgaaataaatcagtgaagtgcttttctatctaaactgactagaagtgacgcctgcagtgcatttcaatcgtggcaacttttatttattaatgaggttagtgttttcctcgttctattggataacttcaagttaacgaggatcgatttctatcctgccatattttctctttcatttgtagctaggttcaaaatctcaatgagtcattatgaatctataacattttctctttatatagtccatccattttaaaaatatttaaaaaaaaatgaatttttttatttttattttttaatgtttttaaattattttgatatggtaatgttaaaatatttttaaaaaaataaaagatatatttttgatgtatttataaaaaaaaacactttaaaaaacagtatcaactacactcatgaacataccctaagtgttatattagaattgtgttttgaattattagttttttattttaaactatttatttttttatttttttatctctttgatgtgttaattttgaaaaaaaaataaaaaatactattctaatgtatttaaaaaaaatatttaaaaagcaattttgactctcgaactttatacctcttgcagtcttctaatccatttttatcaaccattggatttcaaactatttatcacgatattgttaattcacagaaaaaaatactagatctagtaattttatagttggttattttttaagtttgattttatttatttaaaataaataaagagatacaatcatgtgatgtttttattattattgatagatcgtatattttatattttttcctcctatatatatatatgtgaaataaaataggttgtagaaagtaattaacagataaataagtatttacgagtatagtgatagttgttttttaaaatattttttgtttgaaaatacaatcaaataaaatactttttattaatgaaaataataccagcacatcagagtaatataaataaaatatttttgaaaaaaaaaataagtttttttttttaaaatgctattcaaactttgtcattaaagtgattttatcatccaataatcctggcccacaagttagttgacatgtttgctgtccgttataccgtgcccaaaaataccaagaaaaaaatactggcccaaactaaattacgcttcattcacttttctgggcctccctatcttcgcttcaaactgcaatggcgagcccagatagaattgctcgtttagtggagtaaagcttcacccagtcgaactcggattgagagaggggggtggaagatgtcgatactgtgggagaagagcgaggcctggaggtggatagtgaggaagacgagagactcaaagccattcttcttcacattcgctacagtatgcggtgtcgttccaggtgtgattgggtatttcgtgatgcaaaccaccaactctagcaaccccgagctcgaagcccgcctccgtcagaacgcccgtcccgattcccttgtacgtacgttatatatatcttgaatcaccgttgattctctccataaaaacgtttgatatgcagatttttgggcatggcccacgttgtgattattaacattttaattcccaattcttttgttaactcggttgttttaagaatctgaccctgaccctgatgctatatttacaagtagtttagcatcgaatgctagaaaataatatatgaaaagcatgttaatcactcatagatatcaagaggaataatggaaggggggcaaagttttctgggggaggggtacaacaattagcataaagttgcaaactaatcactggaaacttttcatcttggttaagcttccaaatttcaatacatggcagatggatttcacaactaaggccacttctaactgaattcatcgtttggtaatcacaggaatgaaagtgcattgcagtgacctcagagtagctgctctagatacttaggctagttcctcttcagtttctgtctcatatcctagaggtatattgccccaaaatcttggatcatggttaaacaatcttaaactgcgttatctttacttgaatttaagcaatgttagacctattattttgtgatgaattcacatggtagaacttgatttttaagtagtctcgacattgaaacggctgtttttattttaataaacgagtttaattctactgtgattgtataaagcctttctcatcttcaaatggaatcacttgttgacaaattttgcttgctcgactttctcaatcagatgatgggtagagttaatcgagagagactagcagaataccttggcgagctgcagcggaaagaggatacaaacgatcgatatgtagctgctcttagaggggagacatttacaagaaacccatatgtaagaatccagccaatacccaagcagaatagcactgaagctgacgatcaaaagaagcagattgtttgatggttctcgctgatgtgccactttctatatttggtatattaatgccatggctgcacaagaaatgcaaaatggtccctcttcttcttgttacgcaacagcttgtagcctgtgttttatttggaatatttctgctctggtttgttttttttatacccgctgggaatgacaacagtgtatttcatattgtgatgtttctgatttgcttttgcatcttgaatccaaaatgcttctcagctatttgcagtttcttggtagttcatggaaaagatgatgttagtgcccaggcttgattccaggcctggctttcgaggctcggaaagaagtgacatgttttaatttcaaagtttaatgctggcaaggaagttgataaaaacagaaattcatacagctttaggctaaagcatctgggcacattcttaacttcgggtcaataatgagcaggtgtttccctctttttgaaaagcaggtcaatactgagcaggtgtttccctctttttaaaaagctctactagaaaataatacaaatcatattctagaagtttacttaacaacttaaacttttagataagatatttttttaatatgatatcagaactatattgactcagcagtcacgagttcaaatctcaatactctcattttatttgataaaaatcaagtacaatgtacaataaatctatatgcaagtttcaaactcagaagatttttatttaagggttgtgttagaaaataatataaattatattttaaacaactatcagcttaagctattagcatatgattagtgtacccagggggctaactccaatattggagttgaggaggttaaagccgtgcaggggttggcttttgacatggggaatcgcttcccagtgctgtaaataatattctaaatttattggagatgaagtgattccagaagctaaattttgcagcattgcaaatatacatcattctcaacctaaaaaagaagtcctgcatcacatttagaaacagaacaatatacagagcatagaaatctaactctgccttcacactcgaacacgcgctcatgagcttacacaaacacacattaaaagggagaaagacaaccacatgtacagttcaagatacaatttccttgatccagtcgttaagcatacagcctgatacgactggtgatcggctggcggcagattgggcaattggatactctctgtccacagtctctacaggtctacaacccagcaacaggtattagtatttgacactgtatttgaaaaataattttatgttttattttaaatttaaaaaaaaaatctatttaagtcattttcatgttcatattagaaataatttttaaaaaataaaaaaaatattattttgatatttctaaaaaaatatatttttaatagcaactgtaaacacgttcttaatcaatcactaaaaaaacaaagttggcaatgtttaggtggcagctcaccatgtgcccacagccaaaggccaagtcctttccattagtcaggcaaatagggcaggcctgtaatcaaaatggaagattggaaaacaaatatttcaaagttataaattatcgacgagctacaatgttccagacaaaaagacagaattacacgagattattttcaaacctgggttctttcatcgaggaccggagaagaaacatgggatggttcgcgatctagcactggacgacgggaataaggaactggaggagggcgtggtactactgtccttgctcgtcccaaagaacgtcttttctccgaaagccatttgaatgtacgagacaacacgtaagaacaagttgatggtatgcagaaaaaaaatggtcagtgcattaggatgccgggaaacgtaaaaatggaaacccttccattgttgttttctcatttgaagtgaaaggacaggccaaccaattttatttatgcacagatttgaaccaagacgtgctgaccagttttagaattggctccactgctgatggtttttattttgaaattttcaaatgctggcaatgctttagtgtggagcagtgaataaacaagtttatcaacctacccgataatacaaagctcgtcagctgccttatactggaggggaatctccatcagagcagctagagcaaaagcagtttctttctcagagatagttgtgttttttgacattattgcagtgaaattaacgaactgcacacaatacatgttgataaagtgctaatatgtataaaaaattaaatcagaatgttggatggaattcgagcttaacattcattttgtcatcactgtacctgaaaattgtcaaattcacgtgctgggattttgtcatcaaatctctgcatgtcttcccatggtccatcaccaactccaacaagaattattgaaagcgggtatgaactggttaagaatatcataaggttacacattgtaatagcttttcataaaagaaacggcaacacatttcagtataaacacgacaccattttctggcattgttaaaatctgatgattgatgtcatcagattcaactttacacccccttactgctgatacaggttgactgacatgttcggacactaaacaggtaaactcgttgcaataaaataatgttctgtgtggaccgagtgtttttcacatacaaatgcaatatcaggctagcatgacaaacaaataattgaataacaagctggttatgatgcaatataaatctgtatacgtactaggacctaaaagtagattgttaaccccttatgattcatttgatattttacaagtgcttgacatcactaaatgggatcacttctcaataaataaagacagccatcagttaaccaccttctttttatgcaactgcccaagtcatatacatctatctaggcaagtcatgtaacaacagaagctctaaaaagtaatagttctaataagaacctaagtttgtcattttaattagatgaaagttatcatatgaccataggatatattttctatgaaagttagtctaagcaagtataaatgatttgcatttatctttaaggctcgaccttgcatcaacaattgccctgattgtttgctcttcttgtggactcatttctccatcgcctgtattcacacttcttgtgaccttcacagtaaaagagactattacttcgattacatatgcatccatacatacagaaacaaacacatgcaagcatgcaggaaaggagagaggattttaaatttcaaacctggccatctgcaatgatgagcaatacatgatattgacctttacttttgtccacaatgtcgattgcagcctcaatcaccggtccatacgaagttggtccttaaaaccaaaacatatatatttgtgaagatttatttgactcgagaaataagtaaaacacaagaatctttgtagaagtaatgttcagccatcattctaattaagtaaactaaggagttgataaaagaccgaattgcagcatcaaataatcaaagagcaaacctgaaagtcgcaagtttggaacaatctttttgtagcatgccaggacttcttcaaaaccatggcaagatgaatgatcactgtgaaagctaaacacctcttgatcatgagtggtggctgtatagatataataaatcaatcaattcgacagctgaattataaggggcaaaactagaaacaacattgttagaactcaacttccagggactgaacctaccatcgccaaagccaaaacaaggaatgaggttgtcttcatcaaaaggagccatcgtctttccaataatagagatggctttctcgtatggattaggtgtgtctccgatggcatgaaggcaacgtttattgaatgagacttggcctttaaaatgaaaaccagcacattgacatgcatgagagacaagccaaaacacaaaccatttcaaaggaacagaaaacacgaggatataatttaaatagcctttttataaccattccagtccttagtatatgattgaatcattcttctatattattagattgcctccttaggtttttaaagattggtttttcagctctggatacttatttcaacttcacggaagtctcaaaatccaaattcctgaataactgataaagtagaacacaatgcttaaggtacaaatcgacgataggatgacttcacttgcacatacctgtccattcattgcttttagtgaaatcaattccaacaatgagattcgatgattccagtccagcttccctcaaggctttcgtaacctgtaaaagagggggaggggggggactgtgagagttcaaccaggtagccatttttattcctatactgaagcaacaagcttctgttatgaaaattacgtacattgctagcaaatgatttccattcttaataaacaagcacttcaaaacaatacctaacgtttaatgccagaacacatggtgaacgtttgcagaaggtttacagaaagctctgcgtgtttgaagtcgcaacttgcacctcaccgcttaactagtgactcgactagtggaatttttttcttcgaatgtatttctttttgcaggataccggtctaaaatgactataaagttaataagaatacaattctattattattattattattattattattattattattattattattattattattgtgtgagttattttatgatattttcgtaatttacctaacttttgcactgtatttatattcaaaatgaatcgtgaattttaaacgactggcttctcctataaaaataactctgagaaaaaaatctgaacgagaaatttcactgtaaaacaacatgcgtagaaaagaaaaaataattgatgaaatttgagaataaaaacggactattttaattatttaccctgttttttttttattttattaataatataaaaaaaatcagcccgtcaattacttgaacagtttcagtactgcctggggtcaccaataataattgatgaataaaaaagcttgcttttctttattatctttatccaacttccacgtttccgttgagtgaagaaagaaaccgtgttgacgacgggatgacctacaacgcgttcgctttattgccagtcgttgtcaattatggcccctcttctcgcagggtttcaaaaaaaaaaatatttttatattttatttttaattaaattattttaatgggttaatatcataaataatttaaaaaatatatattatttaatatatttttaaataaaaatcaattttcaaaacaaaattaatcaaacaattaaacatattcattaatcacgtgagataattatttatctaggtagcgagaggcctagagtacagtcaaaactttgaatacggccaactaaaaaacttcaagactgggtcaaattaagtgcatacatcaatattttttttctcttaaaatatatataaatatttttttatttataaaataaacacattaacattattaaaaaatagtaatttaatatattttcaattaaaatatatttttaaaacacgcataaacaaacttccaaacaccaaaataaatagtggctaagtagttatatcatttttttttttactttggtttaaaaagattgtactctcaccgtgataattgggagttattttaacaatgagtgttatttttatatttagtagtgatttaagagtcggtcggattaatttttttcaaatttttgttttcttcagaaaaaccattaatttaatattgttttaatgttttttggtgttttaagatgttgatgtaaataaataaataaatattttaaaataaaaaacattccaccctaatttcaaatacataatctccacgtacaaagatgcataagtagtgtttttgtgtttgaaaaaaaaaaaacatgtttcatcagtgatggagtgaatagaaatgattgttttttaatttatttatttattaaatacaaaaaaataatatgttaccagtttgggtaaaattataaatataaaagcacctggcgatactttgatatgttgaattataattttttttttgaataacaacatttgaaaagcaaacggaacttttggagttgagtggagtggagtgtgcaagctggtaagaagattcccccgagatgccgtcagagaaaagtcaaatcagaaaaattgactaagctttttgtatttcggtttaaattgacatcagcgagaatttgaattttaaaaaaaaaaacaaattgtaattgtatccgacagatggggggtcggatacaattataattataattatctattctagaagaaaaaatataagcaaaacttccaggaaatgaaagaaaatagttatgaggctcatacctgttctagggaagtgaaattatcagggatgaaactgtatttctgcttgatggattgcttcttatccaatttggaaccagcctttgcttgacttttagaatcaccgccggtggcactagcagtattacacagtgacgacggtggttcgctggacat

SEQ ID NO: 42 - DNA, 69335 bp, Salix sp.
agaagggatgtgccaaagcgatgcagggcctctgttccaataggaagagagggatgtgttttaaacatcaaaagaattccacaaacatttttagtgcgatccaggacctctgttccatgataagaaggtagggtcaccaagtcgcctgagatggtacaataagagaaaaggttagaaaatatcaaaagttatctatttaatagcatctcacaaatagtcgaatacacagcatatgaaaatcttatgctgccgactaatgggaccatgctccacaagtctgatgctgggcacacttggaaatcctcattataaaatgcaagccttatgaagggcaattctaagtttctaacagcctcactctttcaagaaccctaaattcaaatttgtgtctgtgatcaacttacctaggcttgacgaaatacacaattgtgaaacccattgacaaagcgaagcttatcatcccaacagtgagataagcaatgccaagaaagtcatttcttccgccaatccagcttgttgttgaaagcacgagtttcttcttgccattaaaactgtatgtgttatagtagttcatcagtgtcacgtttatgacttctttttcctcgagatccacctctatcttcccatacaactttctaaaagttggcagagctgcagttcgcatccaaaccatgaggtcctcctgctcgttcagctgttacacaaaatcatatatgaccaagtcagtcacgtgccaattacttgaagtaatttgcatagaatagaaaagaaacagtgagaaaaattgatggttctctagtatattttcacattttagcattagaagaggggatatgacacgcaacaatatcccatcattttataagcctaatactcaacaccttgggtttaataaaaatcaactccttcatgaatgaaagaataactgaggtcacacctaaaataatcctgaagttgaagttagcaacctgaaaatacaactctaataaacacaacagcaacatagtattgaaatataccaaatgtccatagtgttattaacattattaaagcctctaagggtatttttcaggatgaagttgaacagttctttagtgtgtgatcagaggagttgcttatatattaatttgaccagatgagtaatagtcgagggcggcttactggtatcgattcattgagagttgcaccacctacaagacctcccccctgaaagtttttaggaaagacatttttaccgaaccttttctgcttatcactcttccaagcaattcccttcttattcactgtcaatgactggttctggcgggagaagctataagtatcattaaacaaactccaagctatcagaccacagggtacaattgcccccctaccatttgcaatatcttctggcttacaagcacttgtatcattctctttactcgcacttttcaactgttcatcacttcggctcttcacatacctgatttatttgagcaatcattaatattaagccaaataatcaccacatataaacttaattacatgtgcttcaactttcagtgagtaagcgtccagtttatgatcatggtaatcatgacagtttcacagcctgttcaatagttttgacaattctgatttgatctaattttagtatcttataaattgatgggttgcttttcattattaaacacatgaaagagagtaattttctagcatcaaaaaatagtcaaacacactattctgagatgagaaacataatgttgaccaccaattaagcatgcgcacttcctgaaccacattttataattggttctctgggctgtcgcctatgatctacgtaaattacacacctggatagtcctggatatcaatgcccccaatatgattatatgaacaatatacctagaaccattatgtaaattctagacatgattacttgaacccgtcagaaattacaagctgatagagtacacgaggttgatgacatacctacgatgattctggtagaagttgtcaagctgatagtaaacataaataggttgcttcatacgcttagggatctggcaagaaaaacaagaatacaggatggaagatcattattcactgtttagcctcgggtcatggtagttaatttctatgattagcattgaagccacgttgtatgagagaaaaagatactggtgtagattttttgtcagaagtagcataaagtaacctactggctactaatacactactgatacagcaccacttgcagctctgacaaaaaggcaatgtcactagtcgatagataacaataaaatgaaggtatattgtatagcagaaaataatactggaataggtctttccttgttatcttataaatccacaaacactgctaataaagaacatagaaaatgacaacacatcaaccataataattgcaaggacaggacttaccgtcatggatattgtgcatgttttatcagcgtcgctttgtataaattggactttattggttctatttagaaccggaatgcattttgtttcataccgttcaacaacttcaacaacctgataaagggagaataacctataaacaaccataggtgaaaatatagctaggattgcaaagatttaggtgacactcaagctcacatctcgggaaccaatcaagcaagcaatgccgatagggatgaagacaatggcaataagcatgaatgtagacaccacctgcacaaagagatatatttggagttaataactctaagtgctcatttgcatcagacaaaaccagttaaaaagaataataaaaacttacccatcgtggtgtgagaattggcttgcaagcaggaagttcttgttgagtaaactttgaatctgaaagaaaacgaaacaatttagttccttgaaaatcacacgtacaccccatatgtgcttgtgtggtgaaaaagacaatttgggagctgcaattgaaacatcagataaagaagctgctcagcggtgctctctctatttttactgttcttgttgtttttaacagctacattacaataagattacaagtgtattttaataaaatgaaaaaaaattgcagattttttgctctggaaaatataatgcatccctataaatttaaaatgtttctatccctctatgttgctttgcaggataacaattacgctgacaggcaactattctgaacactagaaacattctgttttcaatcttaaagtagatcacatgagcattcatgcttggacttggatgtgtgtaatgttaatacaaccaaaattactaagattccgattcatgtaatgggaaatgtccaattactgagtttcattaatatcttgttatcgaacccaatttaattcattttattgccaacaaagtttaatagccagccatatttctctttcaaagggggaatttccaaatatatttttttgaggaataaaaaaaaaggcacggatattccaaaaacggaaagacttcatgatcaatatagagcaaattagatgcttggtatgaaataaaatagtcagaaaagagctcacacaaccaatctcatgcaaaaccaacagcaaatcaaaatcacaggaacccataaaaaatatacataaacctccgcgtggatgcctataaaacccactagtgatcccagaaagaaataaaaaacctgagtctatggaacaggctagcaagaaatttaggacaaggttcaaaacttagcaacttaaaacaaaactaacaacataatcacgagtgggcagtcatgagtttgcctaaaatagcaaaaaataactaaaaagtgaagaagagatcacatttgggtcgctttgaattcctttttggaacgccagaatcacccgatccgttgcctccattactggacgatgccgtgtggctactcatgattgtgttgaaagatgcaaacaaaaacaaacacttgtagtttctgtctctctttctttctctaaaaaaaaaacacaaaaacagccgaagaaagaaaaaccttaaaagagaaagagagacttcaaaaggaaggaaatggtggagatggctgtgtgatcaaagagataaaggcaccttttaaagactaagaaaacagagagggaaaatataaataaataaattttctaaagaaagagtggcagtattaaagaaggtgagtttttagagagagggaagcaaataaaaaaatcataaacaatattcttagcccctatagattcaaaaatgtttcatgttggtcctcgtgatttaaatttcctaacaccaacgtaagtttcaaaaggtttcgatatcattgtaagtatctattagctagcaatgaacattgccgaggccatgttgagttgaggggtgtcggttgaccccctcaacttctcaaaaagtactgtgattacgtgtaaaaaaatataaaaactttgtagtttgttaaaatattgaaaaatccatagaagagggctggatttattttttttgcagaaaaaaataaatgttcaactgttaaattgctaaaaaaagtatattattttatattttatttattatcttatcttcgtcctatatactattctccttatatctaatttaattttattcaaaaccctctcctcattgtcctcttttaacttttattttcctcctcttgtgtgttttcgttttttcaaggattttgatatgatattacttggatttaaattatcaattatcgtaaaatcaaaacagactcgattagcttgtcttgatttcattttgattattttttagtattttgatttttcatctagttttattttaaaaataattaaaaaggggtttttttggttgttcatctgtagctttcatgagtggaaaatcttattattctgatgggaatagagaaatctacctcatcggagatggcaccggggaaatctccactgctatccgttaattattaccattaatcatagcattttagacttcattttcagattgaaaggtaaaatttcatccggatagcacacaaattgtatatttatcaacgtgttttaaaaatatttaaaaaacaatgtttatttttgttttaaataaaaaatttacggtgttttaaaattattttaatatagataagggaagattttatttaatgtgaaacgataaaaaaaaactcgggagacttatgtctcggttaatacaaggcaagttcaaacaaaaattgctgactattttcctttatcttttgaaatgatgtattttttacctgactgtaatttttttttattaacctaggttcactcggacacaactactcgacttaagactgcacttgttccgcacgactaccgtgactggtctaaaatacaagaaaaacaataaaggttagatctcaataaatcaaatattgaataaaaaaataataacaactaagaaatgtatagacttttatgcaagataaatgagagaacaactgaaattttgaattggagaaaaaaaatctagagaatgagggaccaaactggataaaaagtaaacaattaggatcatggatccaataattagattggagacaaattaaaatatgacaaaagagctcgtagtgaaaataaaaatcaaaacatggagggtcaagcataaatgtcataaaatctcgaattgaatggaaaaatcaaaaagaaaaattaaatcaacaaaaaaatccaaatcaaaaatcaaaataaaataaaaaagcgagagccaaatttgaataagataaaaaaaaatcaaaactcatggatttaaagatttactcaacccaatggattaactttgtagtcaaagggagtgaggggcaattaccaagccttgtttcaaaacaaatcgagggataattgatatgatgtaacacaatgaaaaaatcaagttgactcctgatgatcatgatgatcacgacacaaatgtaatcaaagccaagtcaaattccctagcacaaagattcatttcctgacttccaatggtagattcagtaattcatcgtgaattagatatgaaacacaaaaatacctcaactcgaagtaataggtaaaaatttattaaattgtgtaagaaatcataagaagaccaatatgtccccaaataactcaagaacaccaagtgaatcattcaaaaaaaatacaaaattacccttcaaaacagccataataagttttgttgatagaaacataaacatcaaaacattattacattgtccaagtttctgagtttacggttacggtaaaagctgagtgacttttaatttttaaataacaataactaaatatcattgacacggtatgataatattatacatattcatattttccatcaaaatgaaatgtcaattgtttagtaattatttttttcctctctaaaacaattatttgagctgaataataactaaataatactaacatagcatgataaaaaatttcaccttcattctttctttatttatttattaaatttgtgaggaataaaaggaatctgaagaatatagtgattattttttataatatttttcactgaaaaatatatcaaaacattactattatttaaatattatttttaatatcaacataataaaatataaaaataaaaataaaaataaaaagaaacatccagaggcctccaaggctgaacttgaacgctaccaggtcacacatagaatagaagtccactcataacagcgtggaatagaatatatttttttcttcctattccacgcggcatgcccagctggctgctttcaacgctccgtttctttgttagttacgatttttttatatatatttagacaaaattaaacaaactagcactgtcaacgtgctttaggatttggataataataggtatctgccaggtcattactttctaccacggcgacgtttaatcgccagcgctgattaatattgtcatggtagtgtagaagcgaattattaatctaatgacaaagaaaaagtcattcaatatatgaatgctagacgagagaggggtggaggctagcaaacacacatgtgaatataataaaatacacacatgaagcctggtgatggccgcccttcatgccacgccggtggatattttgaattcagagtgctatatctgtaacccttgcatgtctcgtcaattttgtcgatccctccattgcaaatttggaatgctagagtagtcaccctcgatagaccaattatctagaccactaataagaattttatcattgtctcgtattgaatggaaaaaaaatgtttttttttattttaaattattttcatgttaaccattttcattttataggagaagcttcggtgttcgtcaaacatctctgcgtggaagatcacgccgtgttcgtgtagagagattgatgggtgaactacacgtggcgcacaaagtcggaaggatttttcatccgcagggaaatagctacgattaacactggaccaggagaaaataataaactgggcaaaatacaattaaagagggtgaaaaatgttaaatcatccttctcgggatttttatatacttatttcacctcgcgtgctgccatctctagaaataagagacagcatgcagggaaaataatttttttttgataatcatataattatgattataatttttagaaattgttgtataatattaagattattagaaaatttgatggtccacataaatctaaaaaaacttattgtgaaaaaaaaagacacatcaccttaatgcaccatgcctaaaataatattgttatttaattcaatatatgtgatatatatcctttaccatgtatgtttattttcaatttttttgaattatttcgaatcaaattgtatttgaattaaattatgtaattgttttttctgtttattttatctatcatcatgctttttttttattattattattgttatgctatcacctagaatctaaaacgcacggggaaatccgtgcagaagttgccactgcacactacgacactatatatttttaaaatttcattttgatcctcgaaaattaattttgtgcaatttgatcatggttaaagaccagttaattggattcttcaggcaatggtaaaattgaaagaatataaaatataataaaaaaacacggcagacatgagtgatgctaaaaattatataaaaaatttacacctaggtacttgatatcttaaaattacgcaaaatatacagtttagttcctcataaaccaaacaattttttttaaaaaataaaaaaatatttttattgtttttagaccccttgaatgaaaagcagagagatagaagaatcattggaatttggaatctaatgatgacaaaaacatcaccgtttaagtaattttttaccatcaaaaaatatattttctttactatccatgtgctccattgcatgtaaagggtttgatgatagttattttaaaccttgatatttcatgaaaaaacatatccaataaagataaatttaacccgatttaatttcatgttttaagatcgtttcttggcatcccttaacaatgtgtgcgagccaaagcctaaaggtctacttgtgtgcccgagattttccttgtaatgtctttactcgcctaattgcttccaccctctctttcaagggtgaatataatttaaaaaaaaaacaaatttatcaaattcagttgagagtatgactcggagcacaagactaacaacgtgaagtcataaacattcaagttattttatgatttttttaaataatatattgtttaatatacacatatatagagagagattcatgtctcaattaatatccctttcatatgatattttttcttatttaatatttttatagattttttttaaggcactttgtgtgtttagtttctgaaaaaattattaagattaatctatatatatttaattttgtatatagattaactttattttttaaaataaaaaatatttataatatatgcaatcttgtatattttttcatcaatttaacatctgttaatttatattattatttgattgaataaaaaaaaatatttaatgaacaaattcaacaagtataactcgataaatattatacattgtaagattagatattctgatcgatatttacttcttaatttttaaaattttattttgagttattattaatatttatcaacatatataattctctatttatctaagtaaatttatacatgaattttaatttttatatataaaaccatgtcaaaaaaaatatcatatacaaattgtttatatatataaaaatatttagcgcgcggccgaagcgcgagcgttgttgagttaacaaagttttctttctttttgtttttttaaaaaatgccttttcagtgaaatgttaaatttgacgctgcacgtagcggagcacgtgcatatccacataggctccgaaccagcacttcccttctcactataagtctccactagccccttccagcatatctcgctggtggttagatagaaggaaatcattgaaaaagacggaaaaaatgacgttagggagaatagctctggcacgcatcccggcgaccaggggcacaatacacagactcttctctacaacactttcgtcttcttccaagaatcgcacctctcctccactctctcgccacgtaactactactcgtcgtcttttactaacgcataagcatcaatagctttcatctttgtcttgctaattgaatacagcgatcgcgcttttgaatttatttacatcttgtttaattcatgttttaatcgctttgaaataagtagcatttcagcaaatactggttcaattgacaaataatttgtttcattaatgtaagtataatttctgtttgattttttttctgtcattgttagttgcgaattttattaatgttttcatggcagatgagcatgaagagtgacaacctggtttcaaagctaactagctctggtctattaaagacccagggtcttatcgatggaaaatgggtcgatgcacatgatggtgacactattaaggtctgccattattgtgcgtgtatttgtttgtgtttttctctactgcggctactagttttgggcattgtttctttctgccacccatcacatgacatgtatatgttcctttcatgggacggcaggttctcaatccggccacgggtgaagttgtagctaatgtcccatgcatgggtcagagcgagacgaatgatgctatatcatctgcctatgatgcatttagatgtaagaaacttcatactgaaccaaccgttcagttcagtaaaatgtattactgcatttatgctattcacatcaataaagtaattaattaaccttctcctactggcgctatcattccctatgttttgaattttgtaagaggaatatggtttattttgcatgcgtggactatctttcagtactggcagggggaatttctagtagaggattggttatggaagtgcagttattgatgtgttgtctttgtaggttagcatccatgccttcagaaggtaatgacacttggatgtctcctttacagtatgccaacctcattactgaatcgtagagcatacatatgtttttcactgaacttacgtgcatcatcttggttattcctttaaaagaatctgggttttatgacaattgggtgaagtattattaccacactaatccactattattgttctcaatcaacctgcaattcgtacagcctgcaccacatgactatttgctacaatatattaaataccacaactcacacacaaaagcttgtggtgtttgtgataataatcaccgtaaacatggcagtgatgcacactcttgaaattctactttcaagcttctatgtgttgcatctttattcctcttatcctagcttttcgcagcacaatttgttggtgttttactgcctttcagctccctatcttagttgtctctttgagagttatgtgatactctagaagcaaagagtgaatgaaatggtttaaattgagtagttcttacgacttactagttgatatacccttcaaagtattacatagacctttgcgtagatataatcttaataggatctactcatatgacttagatatggaaacctcttgttttttaccataagcttgctaaactcctcattgtttatacgcttttttcctgctcagctataatactagcatattttgatgcaccttttctgatatagcttgacattttttttttgtttcttttgctttactggacttcaaatgatattgaaatttgaaaaaaacttcttgctgatgatcgcaacatgttcattgttttttatttgtccagcatggagtaaacttactgcttctgagaggagccaacgtttacgaaaatggtatttgattcttccataatgattttattaaattacatgtgttgtaaatgtaaatacttccaaattaatcaaatagttggaaataactgtgttgtatcggtacagtattatggttctctaccctttactgaatctcatatgatttccccctattgtaaggtatgacctactaatttcccacaaggaagagctaggacaattaataaccttggagcaagggaaacctctgaaagaggccatgggtgaggtatctcatctgaactttgctttcagaaatcaggagataagcgttaaccctacatcttgtaactggtcattgtcaagcaacatgtgatccaagactccactaacaggttatttatggagctagttttatcgagttctacgcagaggaggcgaaacgtgtatatggagatataattccatcgactcttggtgatcgtcggttatttgttctaaagcaggtgactataactgtttgtgatatttgaaatcttgtttaattgcagatatgagtaaattagttcttccgacagcctggctactcatatagatgtcgacaatttcgccttggtttgagtctcttaaacaaggccttttcaaattgagttttaatttctggcaccagcatgcatgtttaatgcaccgatatttgttaaaactacataaaactcgtgattgggacacattccttacatgaattgtgcttcagtctactttatcctgtgagcagtccagaaatgtatttctcaatgatctatcgtgatgaatagttcttgccacaacttttcttctgtgagctgtttacatggctttgataattttcagtgctgcttgtttctgtgcaatccatttatccagcaatctcatgagtttttccagcctgtaggtgttgttggggcaatcacaccctggaactttcctttggcaatgattactagaaaggtgtgttcattgtaggatgattttgtgcaaagagagtttacttttctggtgcatgagttttctgttgaagaataacatactttttcctcacttgcataggttggtcctgctcttgcttgtggttgtacagttattgtaaaaccctctgaactcacacctctcacagctttagcagcggctgagctggcccttcaagctggaataccaccggtgagtctcaaactttttatgtgcactgtggaagtttcttaatttcctaggctgtgtaagatgcaagtgcttggatataatgtggccttggtcatctatgtaaattgtgtcttgctagacattgaagataaagttgatactttatggtttcaatgataaagacttatcctttgtgacacaatgaagtttttggagcaagttttggttggaaactaggatacttgtaatgtaggattttagtcttagcatccaaaaatattctattatctggttgtgcaagaagaagctgcagcaagttaacaattagaaatatttactaaagagcttaaaaagtaaggagggatgataatgtaacaaaatgaatctaagcatcatcccatggttattagatgtttatcacaagattccaactaagcaaagcactgaagaaaaatgctcttgctgactgttaaattgagtgactttgtgttgcatgcacaccttctattgaagaaccataattgacaaatcaagtgaaatgctcagttgtatttatatcacatcataatgattgctgacctatgctaatagtcagctgagcatccttactgagcattgaaacagagaatatccatcactggcagtcgtttttgctccatattctggtttagcatgtccttgcatcacaggacaacagcaggatctggtctatcatcctgatcaaactgcattctgcttcgaatgagataatgatggaatgaatgtagccttttctggcctttttagatgcatgtcatacacaattgatgtgttatattagcgaatatgagttcaaatttgttgaaattctgttcatttgtttttaatggttttaattttcaatatttcagggtgttctgaatgtggttatggggaaagcttctgatattggtgatgctttactagcaagtcctgaggtttcatatccttcctctatttccttaaacttttcttctctttgacaacatggcattgtcttggacagagtaaatggatattcaatgacataatgttgatactcttgctttatacatctgattcaggtaagaaaaatcactttcacaggatcaacagctgtgggaaagaagttgatggctggtgctgctggaacagttaaaagggtatgcatagcatgcaaaatgaatcaatgtgatgatgtttcagaaactatcttatggctaactgtcttttcccttaatctttgtagctgtctctggaacttggtggcaacgcaccctgcatagtatttgatgatgcagacctagatgtggcagttaaaggatcagtaagttagaggggttcccagtgcatgcttatattgatagtggtatcgacgtggatatttctgagtgccatttaatattgtttacttttcatgtttagacatatcagatggacacacactaaacctctgatctgactaggatggatattggtgcagtgggttgttaattgttggttagacatgggggtccatgcctccatatttggaagtgtaaccttttgtgttgattacattggtgaagccatttaatttactgatttcaggacagcctataagaggctttgattcaggattttgagaatgtgtccttccttcatgatatagctctttgttttgcatccaatattgggtggtcttgtcatggtggtaatcttatcaaatcattttatatcattgcagcttgcagcaaagttccgtaatagtggacaaacatgtgtttgtgcaaacagaataattgtgcaagagggtatccaactacagaattacagccctgatttaccccttaattcgaattctatatgtaatatgcagcattatgatttctgatgtgttgcgcctttatgtgcaggtatctatgacaaatttgcagatgctttttcaaaagctgttcagagtatgcaagttggggatggctttagtgaaggtgtgatgcaggtatgggtagcattttcctctttaaaatatttcgtaattgttcccttattgaataataatttgtgcaaagctagtcagttactctatgtttcctagatttagcagtctctaaggatgatgacattcagtggttggtgacgcaagctaggctgctttatcatctttatcacttcctgtttcaaagagtttgcccaccttccctttttgagctgtcctaaaactattgctgactatgaaaagccgaaattatcaacaacttgatcttcttgctatatgatgagggtcacatcactatatccttaatttaactcattttattttatttttagttcaactactttctcccttgtaaaattagatttaaacgaaacccttcatttattgagtttttcaaacataattcatattaattgaggagtaaatatatcaatgaatttcaatgaaaaattgtcttaattatactatttattttgctagaaattatgcctacacatggtagaaaagttgtggttaacatgtctcataaaaaaaatgttctttctttgtagtttcaaaccttgatcaactactttgtatatcaaacctctcaccattccttcataaccaccttgatatgattggttttgaaatataataaaggctaatactggaaagttatgaaggaatggatgacatgccatccaattaaatgttctttcataatctttgtgaaaagtggaagggtactaaactttgggtaagagggagtatgtaatttgtttggatgaagatattctgcttacacattcacgcagagatgtagtgtgttgtgtttatacatctagaacctttttattagctactttcatgagatttgaagtgaacagatcatggtgataactattagtttcctcacagggtccattaattaatgaagctgcagtccagaaggttagttgcattttatacatactattggccaccatcttgcttgtgttaatccttgtttattagtgagatttgatgtcatttggtccctttgtgatttgggtttcaggttgaatcatttgttgaagatgccatctttaaggtttgccttttctgctttaccttgttcaatgtactaggttgaataaactccacgcattatattgtctttaaatctttcaatatttcctcttcctccccacaataccctcgacctatgatagcattatatttttatgaccaagggagaatttttgtaggctgtggtaaacattttttatgttttggtgaaacctagaagtatttgaaatattttcaacgctcaaaaactctataatgcaattaggctaccttgacattctgtttcttttttatatatttctcatttctaattaaccaaaattgtacttgaagggagcaaaagtcctccttgggggaaaaaggcatagccttggaatgactttctatgaaccaactgtaattagcgatgtcaccgaagcaatgcttctttcgaggtaaatacatgaagttaatatattgatcctgcaagtctcagctgaataattaaagctgtccttcagctttcatacgacaggtaaaaggatagtggtggttgttctctgccacttgctgatgggtatacattcttaccttcagtgcagctggttgaaacatgcagccatactaaaaactaatagtccaacctttaggttttggcatctaatcatggacactcatggtggtttgttttttttactctttcttaatcatggcatgtaaagttcaattgcaaatttaaggtgaatgagtttagacaaaccaaacttgaggtattggtttctgattggggactaatccaggtttgcagtagatgacacaattgaaggctcattagaaatgttacatacaaaaacactgctgtttatcaaatgaagttgaggggctggtcattcctatcagttctttttatggggttttggagctggtatttcataattaacttgcacgggttcattgtcaaattatagaaccttattaatcagagcttagctcgaagagttaatgaatatgtataggtttataatggagcacgctgtggtttgcattttctttttcgctctctgaagtgttttggtttgcacagtgttgacatcagtagcattagcttttgttttgacaaatgtgacatcatttatttgcttacattaacataactctaatccatttcaaggaagttcctgaacattatctatacggtttgtactcattcaagatgttaatatgctctcctctgccttgctacagggaggaagtatttggcccagtggcacctctgttgcggttcaaaactgaggaagaagctatcttgatggctaataacacaaaagcaggttctttcatctgcctttcatgcatacattcccacatatttatcttttttgtttcctcattactatcatttaacttgcatttaacaaatatattgattatctgagagtattacagatgaagtatgcaatgtactccttaacccagtttcgttactattgtctgtctgttgtcttggtaaacagactgatggtcaattgtaataacaggattctagctcatcttttccggtaaacaatgcagggttagctgcatatatcttcacaaacaatgttcagcgttcatggcgtgtcactgaagctcttgagtatggacttgttggtgtcaatgaaggactaatttcaacagaggtgggactcatcctgtgatccccattggaaaccatagattggcttcttaaaacttacaaaatgtctgttgcaaaacaggtagctccatttggaggacttaagcaatctggtcttggacgggaaggctccaagtatggaatggatgaatatttggaggtaaagtaagattacttttaatgcatcttaggaacccccgttttttagggttttcaacctgtgtttatgtgcgcgagagatgatctacttgttatacccctggtttccaattccctaaagatcacctcttttactgccataacgaggtactcttgcatgccgtgcagatgaaatatgtctgcttaggcgacatgaacagaaaatgaggttcaaggtttgtacatatcaccaattgcctgctctatctggaatctgcctttaaacttaaattttcagctaaaatgcttgttgttcggcttactcaggctatcaattcggatcgtaatcataaggtgtgatctggattgcggagagcgtgcagtctcgaccttttgaatctgaagcgttgaagatgaccagcattttgtacgtaaataaatgcaaatttgtaccatctcccagttaaattaatgtgtcatgctgttgtctgttctaaaccctttcatcgagatattttgcttctgggtaatacttgccaacctttttatgcgcaaatggttagtttttcttttcttctggtagtattttctttggtaccatctataattaatgagcctaccaatcttgtttctctatttgcatcggagaaaggagagatacaaggcagagatgtgaaaatctgccacgacttccctctatatctggtgaaaatattattgatagtatgacaagttggaaattacgaggcaactcccttgtatgagtattgagtatatgctgctgtttcttctaatataaagataaagactgtcaaataaatcaatgttttttccatctaaaacaaataccgcttttttttttatataggtattgaactaaggtttcaatttcctcccaagaaaattaagatttcgtttttattaataaaattaaaaaattaatacaaacaattcaactcttccgggtcttaaactctttccccccctttcattttgtacataaaagctgtctcaattaatcgagaaataataggattgatctgtcttcaaattgaaaacgcatgtgccaaggtcactagaggtggtgtttgagaatctgtgctttagaaagtgcttttgatcttaaaagtaaaagaaagaacaccgccatcaaattctaatatcaatataaccaaaagaaaatcacttgattttgagggaagtgattttaccaaattaattcaggaagtgcattcgaaagtagaaaaaaacgtccgttctgaagctcgattcttacaatattgctcgagctgccattgagatgttttttttttttggctcttcaacacttgaaaattcactcagctgaaaattataaaacccttctctaattccaatccatctaataaggctacagtttatagttatacaaaatccaatatcggaaatgtgataattaggagggtagctacaagaacatcgtcgctttagcacatcgtaaagtaaaaggtaaaatcgagtatcaaaatgagagaaagagggggaaatctaagttgagtagacagtcctgtattccaaacaaaaggtgtcttgccgatggaatgtcatatattccgagatcctctactgccagcttactgaccggtcctttctcttctatttttagataaatcctttcaacttcttcttcaccatcatcgtcgtcgtgtatacaggcaaacttcgaagcacatttcaccgttttttgtttgcaatatgcatcagagcaatctgctcttggtgaaatagagagactcaatctcaattccggagattttttggggaatttcgaactccagacattagttttttttttgatttcggttaattagtctacaaatcatttgtggaccatttttttttaattattatttgaggtataaagcattagaacgcagaatgaaacatcccatcaattcccttgggagagcaagatagaaaagacactattctaaagtattataagcgtacataaagacgggcccctcaaattcaccttcaaaggaatatattcattttagagaatatattcattttaaagatgcttgaaactcaagctagcatgccattaaaattaagccaaccatttccccactgttttagaggcttcaagtataatgaactaaaagttagaccttagctttgcttggttatattataaaggtacatatagtgagctaatgtgttagtccaaaaagctaggaatcttccaatctaaacgaaacgccagccttcccatatggatagagagaagccaaaatgtaaagcaagcaaatgcatcgtaattaattaattatagcaaagtgtggtggggggctggccattacggccagcttcgtttacatgcaatggcttgatttggaccaaatcgtatagatgtgatggttgtatgtgtaaattgtatggcttccaaaaagaaaagaaaagaaaaaaacatttgacagtttaactctccatggatacgtgcttgtaagaactctagacagacacgattacaagtctttgagaatgagtttttttttttttgggtgggagaggaatcttcctttgattgtaaaagacgaaagcatctattctgatttattagatttcagttaatagcttccatttcccttttttagatttctcaagacttgctttcctcgcatgggcgggctacatgagaggaagcgcgctaattatttgctttgttttaaaatactgagtggtagattttgtcatgagttggatcgacgtttcaaattttttggagtctaattgcttgttacgaatttagtatatttggttttgaatatgtttgaacgtaagctgcctgtttgttgatgaccatctcaattatttacgagtgatggaattttcaattcatatcgagatctcgcaaaaatcttatagaagcgagtggttttttccccttttcaaaatgaatatggaaacaagataagaaaatccatcaaatatactttttgaatgaatgtttttttatatagtaagtttaattaatattaattgtcattatttttttaatatttaagtatatgtgtcaaaaatatttaaagttaaacattgatatacacttaatatttagttttactatctgatgaatcaatttttttttgcttttacttggactttttttctaaaagaataattaggattgtatagtagttcgataccgttggttttaaccaagcgttaagcctatatatgcatgagcttaaaaaaatcttgggctcgatgattactttgataagtcaaagaaattttactataataaatcataaataatttattcttgcgagtcatgtatattttacttacactttaacctcttctcttataaagagacgaaggaactataaataaactagaaatccttcatgcaaagagttataaaatttggattccccgctacataattattttcaatgttctctaaaatataactgtgttttctctcaaaaagatacctgctagagcttcaaagagtttctagattcatcaacgagatcttttgcagttattaaatactagccaccaactatattagctagagaaaaatggattataatttctcacttttgcctatgtcagttacaagagacaaagaccccacgataagttctctttaatagggcttgttgaaccttcacattctccttcaactattagtcccatatagacaaaaacaaaatagagattataaataaggaattaaaaaaaagagatactcattttaagtatctccattgaattttaaacaataaattttaaaatttgaacaatccatacttattttaaaaagagattaatactaaaacatcaaataattcttaaattcaccatggagatcttttgaccaatatccaccgagtatcttgtataagaagaatgatttagattgctagaacaaaaatataaagtgattattcaaaaataactcttgcttccaagctactttgatttcatattacatttataaaaacatatatttaaattaactgaaagttatttgaactcgtttaaaatttattagaaaagcaactctctttttttccagcggattttcaaaatactcaacaagtaaaatcacatttggacatatgaaaatcaatataaaaataataattgtatattctaccaaatccctaatcttatttgctacacttctttaccatggggagcgtggggcccagtgtcaatttggtggctttgaccctgtgagggagcttttgtttgtgatgcatggtctggatggaagcagaagtgcatgtcaggacaatctttgattccacaaaagggataagaagttgagcccagcaacaaagctttagaggaagagaggtccccaaatcctgtcgtcaaaagctccatgctcgaaaccctagctttatgcattgatactcacttagtcctacaagctggttcctcctcctgtaattctctcatctctaatataattaaactacatttatccccaatgcttaaatccaaaacgcattgtcgaagctcgtttgctatcatcttgttttttgttttttttaatttgttgttagaattttgaggggtgggtggggattaatggtgtagaaccgacactgtttgaacaaaaagaagagggaaaacttagcatggctgatgaaaattttgaaagcaattgatatttatatgaatatccgaaatctaataaataacttaaaaatatctatattttttttatctaataaataatgatattaaaaaattaacccacatatacttattatcatcgctatgtttatattagtatgatttttttgaattaattataacgtaacttcaacacagaaaacccgtcccacagatcatatatatatgtgtgtgtgtgtctatatatatatattaaacttaatcaccacatgaaaggatgtttttaagagatagtaagtgttgatctacgagaagttaaagtacattaagatcatactttgggtttagctactttaaaaaataaacgattttattctgggcggtggggttgaggttgtttcatgtggggcgcgtccttcctaatctttgtcagtgattcactggacgtatagatgaccggaaaagtaataagaactgagatacagcagtactggtaattgcatgagcacacgtgtgaaaaaaatcctcgtcatgctcgtacatctgtagatctaagatattccaacagttatcgtgaagggatcgatcggctggcttgttaaggattttgcctctcttttttagcatttaaaattgaaattctcacgaggatgcatagatagtctatttttaaattaattgtgaagtcgaatttaaggaaaattatatattttaaaaggaaaaaaaaacactgaacgaacaaattaagatatcccacagtaattgtgcaagtagtctatgtgcacaagagaggtttagataagatctaaaactcagcagaatgtcaagataattattattacaaacatataaatcagttcttttggcgggccaaaaagatctagatgcacttcttgcaaagaaagtctaagtaaattcagaatccaggcaggaggataatattaagggtcaattaatacatcctctacctaagatttcaagtcaatctctagctatataattattaaatgcacatggattagatctctcgtgtctttgtaaactatgaacgtatttgagagtgcttttacttgtatatgattttcaaaagtatttttggcttgaaaaaaaaaacaaattaatttttttaatgtttcttatgatttgaatattatgaaatttaaaattaaaaaatatattttcaatcaaatagcatcttataccttgcactatattctaaaacacccacaagggatattatttgtaaacgggatcgaattctaaagttctaaaaaaacaatttttataaatatttcaatcaactatatcttcttccggccggcttaattatagctgaagtcactctaactagacctgggtatcaaagacacaataaattccttggaggtttaacaccatatatttctaataacattaataacaattggataactgtaatatcaagaaatacatacatacatatatatatatatatatatatatatatatatatatatatatatatatatatatatatatcttgacaacaaaaggagaacatttgcaataaaagagctaggtaactacataacccgaaatgacaatcattttgtgccaatatatataagcaagaaaccaggatggagactgtcttaatcatttaaggcatcatcgagacctttttgttggcgatgacataaataaagcctgtcttgtgttcaaaatcatcttggcaattataatcttattggttcataataagctaaaaagtggattgtactacgacacaggagaaatgatgacaggtggccatccatgcacataatgtttagtaagatctaggtttatatgcccgccgagcatgactctttaaaaaaaaaaaaaaagtaaagtacgaaacatagtgtggtcgtcatgattgcgaagagggcctccatttctcatatcttaataccaaaaaagcttcacctagtagaagaataacgctgcaaaaagatttttgacgggattaacaagtggataattattttcaaaagcatatatagctgctaacttgaggttaattagcagttgattacacatttatatttggattgagaaatggaagttaaaagatttgaactagaaatacacgtacacccccaaaacataaagattctcacgctctatctctatgaatgcagatttctctttagagaggacacgatcaagtaattttgcaagggtatttcatcaatttagggtagattgctagctgcggtaacacacagagatagagagagggtatcttttgaaaaagtttgtagggctgcactttaggatagaaactttattttattttaatggtattactatacgttttcttttatgcaaggttaacctgtccccccctccctttgctttctactagtagtctctgtgtgtgtgtgtgtgtgtgtgtgtgagagagagagagagagagagaaatcccaccctctcttcttcttcaaaaacgcaccctattcttccctatttgcatcgcatttgttcttgaatctctttgtattccctgagtctcagagagagagagagagagagagagaaggaaagagagaatgttccataccaagaaaccctcaactatgaattcccatgatagacccatgtgtgttcaaggggactctggtcttgtcctcaccacagaccctaagccccgtctccgctggactgttgagctccatgaacgcttcgttgatgctgttgctcagcttggaggcccagatagtactgaatctcgatctctttgactagctcgatagtctttagttatatttctatgtacgttcctaatttgtttgtgttgatcacttgttcaaatctctaatacgtgttctattgcactgcccccctccccccgcttgatcaaaaaaatttgcagaggccactcccaaaaccatcatgagagtcatgggtgtgaagggtcttacgctttaccacctcaaaagccatcttcaggtttgaatagaacattctttcatccatcttttgcttttctgctgacacctttgcgacattttcgatgtagggctggcttgatttcattcattcttttccttctatatttaattttgcatttctttaacgtttcttttcttttaatttagaaattcagactcggaaagcagccacacaaagatttcaatgatcattcaattaaggatggtaagagagctaagccatctttatatccagggtttttgtttttgtttttgtttttgtttttatccttacggttgttaaaggtggcaaggaaagactcggattcgactccattcctttctttttctgtacacagagagtgctaaaattaatctaaatgcctacctgttctgttttctttttccttgatttgattcttatacatgcacaatgtgatcaaatgatcagatgatttttttcataattttccatggcaagcaggttcggcgttagatcttcaacgaagttctgcatcttcatctggcatgatgagccgcagtatgaatgagtaagtgttgcattcaaaaatatttctttcttaaaccaaacaattacgaattgaacaagcagaagtcatgcaattttcattttcttaattttaaggacaacaatgatgatatataaaaatctcttaagtttctccttttcatttctgtggaatatatgtgtgaaactgtatatagcagtaactcacacatgattgatacgattaggatgcaaatggaggtgcagagaagactgcatgagcaattggaggtaaaacacagatcgattgtttctcaacatctactccaccccattttttttttataatttatttccttaataaagacagtcggtatagactctttttttatgcacatatataaattaattccaggttcaaagacaccttcaattaaggactgaggctcaagggaaatatatacaaagtttgttggagaaagcttgtcaaaccctagcaggtgatcaaaacttggcttcggtaagctataagggaatggggaatcatggaatttctgatatgggtggaatgaaagaatttggcacactgaatttcccagcatttcaagaccttaacatttatgggggtgaccaacttgaccttcaacacaatatggacaggccatcacttgatcatggtttcatgccgaacaacgacaacatttgtttgggaaagaagaggcctagtccttacggtggcagtggcaagagccctttgatttggtcggacgatctgcgtttgcaagatctgggatcggcaccggcgtgtctcgaacctcatgatgatcctttcaaaggtgatcagatccagatggcaccgccatcaatggataggggtactgatctggattccatgtctgacatttatgaaataaagccatcgcatcaaggtgatgcactggatgagaagaaattcgaagcatccgcgaagctaaaaaggccatccccaagaagagccgaaaggatgagccctatgatcaatactggtggcatgccacaaggcagaaactcaccatttggttgaagccgagctatgatctatgtagatgtaagtgacatgacataaattactaagcttgataagtatgagatgtagggtttttggaattgaaagttgctacgtacctatttgttaaattagggtctgctctgggcataacacaacgccatgcgtgcgtggcaaacaatccagtgaaattgttgtgatcaattagcaatatttacattaaacttgtacttaatttggcacttggcttcgtcttgtatccctcgtgcatcttatatttcatggtttggaatacagtgacatattaattaattaacacttaatttagttagtaaataaatttcttggcaactcctttactactatcaatattatttgcttgtaattaactcccaccccatacgtttgttgtcattacatataaaaaagtatgtgactttgttcattttcaaaccatgagaggcatatttaatggaaatttaaggatagaagaaagaaaggcgaattcgatcgtgtccttgaagactcattgaatcttgtactgaacaaaaaatataaaaaaagagatgccactggatttgccattaattattcctggaaaaagaatgagcccccggctttagtttttcaatcaagacccgagcttagaaatgcaggcatgaattctagatcgacaatttgagttcctgaccttcctcaacatggtcgaagaaaacaaactgaaaagacaagacaagaagattttgaagagtactcctcttgcatgcatgcaagttaaattcaccaatatcatcagtactagttatggccccaatttatgtgagaaccctgtgaatttctctggaagcaatgaataattaatccaaaaaaaaaagcaacatcttcctttttttaatgagagaaaaggaaaacaaacaacaccttattaaccagatgctagaccagaccgggctaatgcccgctagaacaataagaaacggcaaacaatatatatatatatatatataaggcaaaagaaaagaaaaaaatcccgaaatttgaataaagtatatgcaatattgatgtaaaactaaaaccacatgaaaaaaatgtgttcatggaggaaccagaacctcaatgcattataacgatacagattatttatgaaattggaaacttcagaattattattttttcctgatgggggctttaaaactctgtagccctgtccaatgtcatgtttggtccttgagggtcaatggtcaagccatcatgcctgttaattactaatccagaaatctttttctaaccgctgcttttaagttagttgctctcagttagttagtcctatcattgcagacaaaaccattggggaaatgaacataagaaataaaaaaaaaatccactatccctgtcaacaaaaacattctagggttttgggaaaaagcgggcttgcaacagaaaaacaatccatttgatctgagtgaatggagagattacataaatggaaactttttttcatgaagaataatatttttcctttgagagaactcgacagggggtatctagctattgcaggttccatttctcctttaattaccactgtgttcctagggcatcaaaaggaagaggacaaattactacagggcagtactctcatcatcattatgttggtatgcattgcatcagcatgacatgaagaaaaacacgcatatcgctttcaccatattctcaagattttgccccaccccacctgatatcaaaccctttttagaactatcatatgatcattatatacatcgacaatgtatatgattttctttaattaattcgtggatcttatggtgtgtgcttttcactgataaattctctaccaatattaaacccggactcaaattctcatcgatcccggtaccatattttcatatattcgtaggcaaactatatattaaccaaaaataatatcaccctttagctatatatcactaggctgttagtgtagctaagatgagaaacatgcagaggtttctttctctttgttgatggcaaaaaagatgtggtgctgctacctttattggttgcagagaaaaaaattagggcacagcaagttgtcaggaaagctccttctctccacacagacacaaagagaaagaagaaaagctaataaagcctaaaggagaggcggaatacaacgcactttcatgagtgcacaaatcgaggaagcttctacctttatgtgtgcagatggaagcgtcttcctggcctcaaaatctgctgcgtgggtacgttctatattacatttacactaatttacatgcataatgtcagtattatgctttatgtggtgttaatgatcataaaataagattatgaatctaccaagaaagaaaataatgagagggtgattggggcacgatttccgaagcaaattaaataattgtttgcatcctggttaaggcaccttggattctgtttagcttcctcatttgtgacgtttgggttcttgctttgagtgtttactagcaaagtgctgactagaagcttcttttgtcccatgtctctcataccttttttcgcatgtagaaaatttgttcgaggagaatgagctggttaaggataaaaataaggtcggagatgtagaggttacgccaaggacattgactgatgtttactgccattcccgctgtaggtttttttgagctcagtttcgctaatcgttgccgaaatataatgtgaataacattaattcgttatgacatttttctagctaggggaattacagtcattatcttcacttagatattgtcaggttattatcaccctgatgtatccatattttaacgaagaaaaaaatagagcccatgtacaactcttcaatcacgaacatctctaattgtttagttttttaaaaataataataataataataataagattggtgtttaattggtgcttacggcaaaatagatagatagatagatagatagatagatacgaaagaagaagagaacaaacatttttggttgaaaaaattaaacggatatataaaaataaaactccatttatgagggttttaaaatgaatcaatgttttttttttttaaaatagaaaatatatggatgacatgtctttcatgtctcaaatgtatatctatcttttgttaactaaatattacctaaagtgatacaaaataaactggaatttaaatgtctatggacaatgacaagggtattaaggaatcatctcatctaaaagtttaaattgttagccgaaactctaaaatatgttttatattattttctaatacacactctcaagtaaaaatcttttaagattgaaacttgtacaaacttacactacgttgtgcttgatttttatcaaatataataggatggtgagttcgaacttgtgaccattggatcaacaaagctctgatatcatgttaagaaatcatcttacctaaaaacttaagttgttaggtgagactccagaatataatttatattattttttaacaaatgagacaatactattttgagatgggcacatgaaaacaagaatagtagttgataatctctcctttagtttaactctctcatataaaatgataatgaaaattgacttgtatatatatccaatggccagtgaatatttatgaaatcaactgctaaactaccatgggaacatggatttaagatagttttgagaatattaagataagtacttaagctcaacaaaaaaaaacacttgcaaacaagcaattatatatatattgtaaaaaaagaagtaagttaggactggtggggtttccttattcaattataaatttatcattgataataaaaagtaaattgtttgacattgaagaagaagaagaaaaggggacgggacattcaataggcttcgcccaaaattagaatgaaaacttctcggagacgctctaaactcgcctatttattcatgggccttacctcgtcaaaatgctcttagtggagctgttttcgttgaacgagctaaagcttatgtaatagaatttctgtttcaaaatacacgacgtcgtaatgggattacctaatgcccccctgtgcttaaagttttcaaactcctaagtgctactttttaaccagcagtacagtccacggcgtaattttttattacaagcaccgcaataactcgtgtaacattaaaatgactaaagttttttttaacataattatttttttcaagaaaaaaataattaggaaaggttgccaaacgctacctaatattcagcatatattggattacacatggcatcaaattatatgtcgggtctgtgaaattccaaaaaaaaaaatcacacatggcagtccacaatgatttgtctcgtgatgaatagtggcgtggagaacaatattttccccatgtattaaccgatcaattggttcatcaagcaaatcccagaactattaaaattagggtcttagggcgagattttttaaatgtaaagatctaactgtaggagtagtaattttaaactactcagtggaaaacattaagtattgaagttgaacaaatatatatatatacttttaaaacacaaatggagaaaaaataataaaatggtgtcgaattttatataaaaattataattcagtgtcgaattatacgtgttagataattccactggttattgtcggaataattcaccgtttaagcttcaacgccccctgtcagcatcattttaatgtttcatatttatggtggatgcatgaagtttcttatgataaatgtcggcgacttttacatcatgtatcacatttctttcttggatttaacaatctatcactctgcctaaattaaatcgaaataaatgcctacaactcaatgattgggctttaaggcccaaaacaggctgagacagtcactaagtggtcacatctcatcaagcccataaaacacatcaggctcttctcagcccattataaaccacaaatactcgcgagtgccagtgagattccttctccgattttcaatttctcggtggcaactcaaaagtagaggtgggaaaaccataacaagcatggatacaatttttcaccttgctatattatagatttaacgcccgataaattaaacatcttattccatcccaagcttgaattagtgattttgttcttcgtggcttgggaaccggttacatactacacttgaagattaaatacaccccccgccaatattgcaattaggtcaaaaacacatagttaatgtgagttaatcatggagaagcatcaaagatatcagcaggagggataaaataatccatggaaagccctggcacgttgaacacgacgtcgtctatccgccatacctcttccattctagtcctactgtgctgcacagacacttcctcgaatcgaaagactgtagcaatggacctcccctgatgagcaattaacacgccatccacgtctctgtagtcgccgatactacttcctatggtggtttcccagtaaatagtttcattttctggagtctgtacccttgttagatgggagtcttccaaatacatcaagaggccacttttttggcaaaaatagccgtatagaacatgcctcagcacctcagctggcccttcgcttctttccattacagcttctcgatcagcagctacttttagaacgaagcagtcatcctcgccaattgttttctcccctaagcactgtgccttggcaaataaattggctgtacactttggatccaggccctggaatacgtaccaccagatgattagttaagtgcacgaagaaaaggtccaggctatatatgatatttagatgcaggacagggtggtactaataacttataatttaagaggtttcatgtttgagctatgataaaaaaaaaactaaggaagcatggcaagatacctgaaatcaaatgaaagaaccacaaatataattcataaatttcaaagaaatcaatgaaatattgtaagctacatcgatccttatcttttcgtttgagattggaggatagatgatttaagtctcgaattactaattagtacaagaacaagggcatgatgaggagggagctacaaatattttggtgcttctatacatgttctacctcagctttgacattataaccttgcaatttcaatataatacaccaaaataaaggaggtacacagtaatatgctttcgtggacataggggtgtttaacactgtattttaaaaacatttttgaaaaaaatgatttttattttatttttattttacttgaaattaattttttttttattttttagatcattttcatgtactaatgttaaaaataattttttaaaaataaaaatatttttttaatatatttttaagcaaaaaatatttttaaaaataatttcaatggaactctcgatgagacaaataatgtcaacaactggaggctagtgattcctctcatgtcatggcaaacaaaggaaacatatacaaattccctagattttaataataataattaaaaaaaaaaaccataattgttcttccacgagtcatgactaatccctagtttttttggtacgaaatagggtttggcccaaaactccaaaggaatgttcctccctccgtcacttggggctagaggcaaaggaagtagccccggacgagatattgggatttcaattttcaagaatgccacgatagtctctaactttgaggctcaccattattccaaaaaaaaaaaaaaggagaaaagagagacggaaattgacgtgggaacggtagaaagtaaacaagaggaagagggggggggggaggcaagaaaagcaggggcgataatgcaataaatcaggtttttattaactaaagtgtcaaaaaaggaaaagtaaagcgcaaagtgatgattacaagctgcagtcccaaaaaatatacgtgtatatgctttgaacacgatcaaagatgacgtcaaaaacaaaatcacgtgccattcctaaccctgtcaataatgcgagtgttcaaaaaaagaaggtaatctgtctggtaaagctcgggacagtttccctatcatgtcagctgcttgtacatagatcctaccatttctcgggattgtgatttacaggtcttcaattttttaaattttctttaaagaaaacttattttgttcttccatctctatccttatatccggtatgtaaattcgattaaagtagattaaaaatatattgcagagtaaaaaacaatgttcctgatcttgtcttatcatcttcaaccaggagaaaaacaaaatatttatcagttcgtacctggattatgcgacgtagagggcgttggggtcccttggcagcatgagtgccgagccaaggagtgtgacgccacacagtcttcccgtcgctgcctgctatgactttattttctccgacaaccaattcaagagaccacatccccggcaacatttgccaaagaacaaagcacccgttttcgccacttctagtccccaagctcttcacattttttcccgaggagatttctgtctcgcaacgaatcatcttcacacttcctgttgagtacatgtttttcatacatttctgttgctttaaacaccctgttgctgccaaatactgctgtatgatataatgcgcggcggaattttcctgtaaaaaaatctgataaaatggagctgccgaattgaaaacaaaaaacaaaatgataattaaggagtgtagaagaacttacaataggggtgtttttaatgtgaatgcgatggatggggtcgttaaccagagggattggagctagagggcagcccagaactccaagtaaaagccttaaatcctgtcttttgaccggaatactcccgtataacggtactgagaaattgtttcctgctgaaagacccttttgcaaccgaaaccattcacgaatcacctcccatgaactttcctttttgttaccttcttcttgcatgtcggggtcgggaccttccagaagtggagttagggtttgtgcgcaccatcgctgcttccttctagctctcgagcccatggtaattgtaaggaaaccaacgttaaagcttagcaagtgaatattgttaaagatgaagaatgggttttaaagttaaagtgaacagaagctatatatatataaagtgatgattattagggttgcaaggaagagacaaaaagggacagcttatctgtccaacggcagctgatggctattattctaatggactaatacagactcgcatgttgcgatgtcttttgctttttttcttcttcttttctttcagactcctcttgtcgtcttacctgtgcaagtattctcttctgtatattttggaaataaatttagctctctccccgatgtctccgtggaccctgtgatcatacctgcattatctcctaattacccttctctccaggggtaatcttccttggaaaatgatatcacaccaccatatacattgtatatattacaatcagtagacacactgcgtacgaaaagcagtgaagtcttaatgattggcccacagcaacatcaacactttatttcattcatttctcgggtgtccattcatctgctactcgtttcctgggacttttctggtatggctgtagccacgtccgcgtgcactcggacgtacgcagataaataatgccggtagggttctgctaacaaggtcactctccctgtttcaaccacctccactgcgcggtacatgaaaatttatttttatatagttaaaaaaaaaactattcgaaatttgagctgtacaccgttcttattactctccttgaatcaaactctttcaaggactcctttgagtattaaatttcgtatttcttgacgctttccatatatatatatatatatatatatatatatatatatatatatatattctgcctatatttagaaaaaaaatattcttatttgttaaataatatgccaatgatgtttaagtactcttcacttttatcgtcgataaaaatcagttcagcataacaactagtgggaggtgttgccagtaaaagtcaaaagcgaacaaactcaagagcattttcatcggtgacggtttgaaagtctatttaatattatttttaaaataaattttgtttggaaatatattaaaataatatttttattttaataaaattattattatatgatctaaaaatactaaaaaacatttaaaatataaaaaataaatatttttaaaacacggtgccaaggattttcttggtatattcaataataataataataataataattttcttcaagaagtggttttaagattttaaatcaagtaattaataaagcaaatattttaaattaccaaactaatcttcattccttgtcatttcatggtaaagccttttgtgatcttttccctttataaattacactccttcggtgactggaattgtttggaaaattcattgaacaaatacgcgagtactcgatcttctccggtcattagatccagagcttacacatggcaattgagattcagtgcaatcactagcttcctggtatcttcttccatggtgataattaaatctgaatttcccagaatgcccccctcgatcgtataatcttgtcaccatgcgataattttccaatagaagaattgtcaaacacaagtctacatagtcatttgcattaattgcacaatttcttcttcttttttttattgacactatcagccaatttataaaccttaaactccagtgatcatgatttatcagtgaatccaaaaaaaaaaaaaaaaaaaactaggatcccacttgcacttattatatttgatgttgaaagtaaaacctaaacttgtcatctgggatccacaaagaggtgagccggatattggatctcaatcaaaaggcaattgattaatgtggtggagagtctgcatcaatggcggtgaggcagatggagtgggatgggtgatcttccaagccaagagctctctttgttttggtgaaaggttgaaacgtaactttcatttgctgggaagtataagcggccgggacataatctgacctcgtaacacatggtaaaatttattcacatggtttcataagattagctactctatcagacaaccatgctagcatcaatgcttgacaaaaatagcgttactttgcactcaagacaatctcgtgagaccaaactctaagacgtacatcacaagtatggttgctcttttatttttattttgattaaatgggtgtccgaacagcttgcgttcaactcgattaatttcatgggttctgaaattaacgatgattctagaaaacaaacatagagatttatcaatagagctgcaccacccagagttagggtgcttatatagtttttttactaaacataaaatattttttaagagcctggcattaggtctacaatggagtcgtaacccgttcctcatgcagatattagaagatgatgcggtgatttagcctccatacctcggtaaagatggaatatgagagacagaaagttacccaagatagcccattcattttgattttgatacgttggcccttcgctatctgatcagcaaactttagaaagattacattaattgggcctgggccacaattgacacttgcccaacaaactagaaacataaaacgcaggcccaagagcctcggcttagcatttcacgacccaccttacaaacccagccagcatgaaacacaaaaacaaaacgacgacgacgaccgcagcttctcgtggagtagcttttgatgacattttttaaggttttttagttttctttaaactccatattttgcaatctctcaaacagtgaatgggcctgggatgagccagccagctcatcgatagtttctgattgggcccttgaatgtagcacgtcagctatcgtcggcttaccggcttcaagttgctttgccggctccctaatacgtggatttactctcgctacgcttcagattcctggcctggtagaaagaagttgctcttcctaacttgtctcgttatgtctacaatgacacttaccactgccttctccaccactgtatgggtgtgttcagttttgagatttactagcggactttttcgctcatcaattggaacgtgtgtattttgagcaattcttcatcataagcagctataatatttttcgaatagaatatgggaaattcatcgtgggtaagctctacaaaatgcgaactcctaaagattctatagcatattttcgaataacatgtccatctggggcttgcccgcctcatcgtttttcgttggctgtatattcggtggatttactatagcctctcttgctctctcgtgatgattacagagaaggtgggcaagagatagcgaggatcggacgagcaagcgtcatggggtttgtatttttcactttaggatacctatccttgccagccattattgcatatatgaacagagttcttcaatgtgttagcgagtctcccagatgggttattcatgcaagggcgcgaggaagaagcagtttcgattctagaagggatagcttcattgaacaacagaaccttaagcttctgcttattaagcttacgtgcctgaggaaattaaaaaactgccagccatgatctttactctgcattggagaccatgttaaacagaagataggttcttaattcagcaagtattagttcttatggtgataggcttcggcaatggaacggtgtgctttggagttaccttcctccttcgtaaccttcataatcgatcgctgcaacatgaagggttcgtttttgggattttctctgctcagtatgttgtttagtatactgtactttgttgaaagcgattttcacagggaaatcagaatgggactagagctggcatcgtaatttgtttggagcattgtatggcctctaatgtgataataaataatacacacaacagagctgttccccacatgcataagaaaaggaagaagaaacaacactatatcttccgtctgtacagctaaatcggtgccttttcctctgtttcttgaataaaatctagatccaattcaacccaaagaaaaaaaatcgcaccgttaacatcttaaatgagtgtttgagattgcagtaatttttatttatcttgatacacaataaattaatatttctttataattttaatgtattaatattaaaaaaataattttaaaaaacacagtgcagcatccttcaaacagactccctcttcgaaaaaggcaaaaacataagagaaaaaagaggcacctccaactgttgtggaatttcttttacatattttattcgcaaatctcatgaactcacatgccaattcagagtaaaattccctgctagctatatgctgtcacgataagtttaacaatggagattccggaagggaaaaaaaaaggtttgtctgtggacactaacagcagatactacgagtcacccaccatttctgtgatcttatccagctctagcgctattccagattgggatggaaacatgaggtgaaaccaacgtagcgctattccagtcttgttaatggtttataatacagcacaattattgcattttaaatattgcccgccatctgtttgacagctttactcaaaatttcggaaacatgataaaaagctgcaagccactgttgttgctggttttaaatgatttgattttgcgatgaggctccctgctgcacgcaaatgggttcttcagactgtataccatattttgcataattaaattcacagatgtgtgccaaaacacgtcaccatcgtaacattctttcctggttttttgaagcatattggtcccgtggagtatgtaaatatatgttaatgggattaaagatattgattgacaaaagacgacgggacagtggaacatgcgtatatggaacctgttcgtggaattaaagacgaaaagaattgattgaaaaaagacggagggtcatgaatggatattgacaaagaaattctttggatcatttacctgacattaaggactttttatctatccggatatatatttcttttggccaataacatgagatgtgttaaaaatatatatatttatcgatgtgggaagaattggaattctatgaacttaaatgctttttaatacttgtttacgttttatattggatttgtgtgatgttagatttgaagtctggagagatgagctctagcctattggcctcggcatacctttcgtatagagagatgaagttatgtttatacaaacttgttttaagataaacatcacaaaaatatctaagaaaaatataatatgtaagctctgtttaaaaatcttgttgtgtgaagaatatatgtttttttattgaaatttctttaatcaatgatgatcaatttgagagcagtgagctagctttcctgagattagcacttgatttaggcacagtgagttctctagaagtataatagaggttatttttaaaagtattttttgtttaaaaatgaattaaaatgacacaagtttgagtttggcagccagcattagtccttgattccttagaaaatttatttttgtataaaacttgcaatgtgattaattattaggtcattttgaaatgtaaacacttcttaagaaggacgtacgttaattaactctaaacttggatgattaatgtatatttgccataggtttactttaaatctatgtcatatattgattttcttttaaaattataatttacaaataccgagacaaatgtcttttgaaagttatttataataatgtttgaatgaatcacaaattaaaaatatctaaattcaattattaaaattgatgtgggataagatccatggtttaatatgggaggagagttgattgtgttgtttatgcaatggtcgataacttggtatgatctggaaaactatatccaaatctctgtaaaataaatatcttgattatttgtataaaattgtgaaagaaaattacctcaatttttgctatgaatgaaatggtttttacgtatattccattgcataaattacatgactgttatataaaatgtttgatgtgaatatctaaattataagatagaagatatttataaagatatgtatggacattatataaaatatcagtattactgctagatctctcatgtcttctaaccagatgtgtttggaaggcttggacttcgaataactggggataaattagtaaacttatccttgacattccaatcttcttttgtccaaggaaatcaataatttactttattagaaaggaaaacaatgtaacggagtattatctggtccaaattcagatattcaagtgtaattaatttattaggcacagcttgtctagcaggaaaaaaaaactagaagtgatggagagctgcgcatggtaccgtaactatgtgccatatcagcaactagatgtgatgccatggattattctagacaacgggtaggttcaatcaaccttcccaccttcacaaacaaattatataatatactagacaatgcccccgcgcttcgccgcgggcggcacaatatttttttcaatgtaaaaaatattaattgtgtatattttttattataatataaatttagctaaaataataaatttgtgcagaattcatgtcaagtgcaagttttttataaaatatatgaatttaaaatcgatataaatttatctgtttagtagtttcaaacgaaataaccagcataaatttatcatcatcattaaaaaagcaagaaaacttggatatctaaattattaagttcactatattaagattagttcattttataattcaatttaaatcaaacaaaaataaaatataaattgtgaaaatatctacaataatcaaataaaaaaaataagttgttaattttctatcaacaaaaaaacgaaaacatagattgaaaattcatcctgacgttattgccattatcattgctatcaaagctaaaattattgctaacattacttccaaaacaattaaaataattaaatttccatgaattttttttaaaaaaaaacaaaagatttttttataaaaaaacaataactaaaattatcattattattgcataaataataaaatcatataatctaaagaacaaataaagaaacaaaaaacaaaaaaaaaaacgaataaagggaaaaatagagtaatattacttttaaaatgatcactggtataaattaaaattttaggaaaatctttaaaaaaaatcaaaagatttttattaaaaaataattactaaaattatcattattattggttcggagattagtgaacaaaaaaacgtataaggaaaaaaacataataataaattggttcggagattagtcatggtgtgtccacgctggcctggataccccgattatcaaaaaacagatttggtccgaggagtagtggtggtgcacttgagctggcccggagatcgtggttataaaaaaaatatataagtgaaaaaaatatataagtgaaaaaaagagcttaagttggctgagagaccatggttacaaaaaaatgtataagcgaaagaaaaaaaaaagtataagcgtgaaagtactgtagcaatccatattgttttttaaaaaattgggcccaagattagtcgtggtgtgcctaagctggtcagagatcccggttataaaaaaaatatataagtgaataaaaaaattataaaaaaaagaaaaaaaatatgggtcccgggattgtcgtggtatgcataagttggcctggacaccctagttatcaaaaaaatttggatatggagattaatcgtggtgcatttaagcgagctcgaacaccccgattattaaaaaacaaaaaaccaaaaaaatataaaagtagaaaaaaaaatatatatatatatatataataagaaaaaatgaaaacaataataagtaaaaaatataaaaaaaaggcaaaaaaaaaaaaaaagcaaaaacggagggaaaaaaaagaagaaaaaaaataaatagaaaaaaaagaagcaaaaacggagggaaaaaaagaagaaaaaagaataattagaaaaaaaaagagacgaaaaaaaagagtaaaaaaagcaaaaaaaaaaactctactgtcgcaatccacagtgcactgtgtctgtgtgcacagtgcactggtgcacagtgcactggtgcacagtaaatgtgggacgccttttattgtttagttaatagataaatatttttcatacagtagttggtatagtctgttttaaaaatattttttaataaaaatatctttcatttttattttatatttttagattatttgaatatgctaatatcaaaaattatttatttatttattaaaaaatattattttaatacattttttgtttgtgtattaagagtgaaattggagagtgttttttttaaagaaatttataaaaatataatatttttttatctcaatacgccaaaacactaagaatattaatttaatattttttttttaaaaagaaatacttcaaagtaaattcaaactcaaacatagatgagcttctcattgaccattcaaaaaactcctataaaaacccctccctccctcttctaagcctgaacccataagactaaggtataattgagtgatagcaactaaagtatggcagattcaacaccacttcttctctctcggtcggagtcttcaaatgagtcaaaacagcctcctccctcccttgatgaaaccattgagcactgtattggagagttcggtgtggcccaactcttccaagccatcctcgtgtcgtttgcatgggtgtttgatgcacagcaaacattcattagtgtcttcactgatgccgagccaacatggcactgcaccagtgattcatgcacttcagcctccgacatttgccgtcttcctcaaaattcatgggcttgggataaccctaatgacacgtcaatcatatcagaatggggacttcaatgtgctagttcaataatcagaggcctgcccgcatcttcatttttcatggggtgcctcattggaggactcatgctagccacgcttgctgattccatgcttggtcgaaagaacttgctgtttctatcatgcctggtgatgtcgttctctggatcattcaccatcttctccaacaacatatggacctactcggccttgaaattcgttaatggattcggccgtgcaacaattggaacgtgcgcccttgtgctatcaactgagcttgtagggaaacgttggcggagtcaggtaggagttattggtttcttttgtttcacgctagggtttttaacattaccagctttcgcatatgtaaatagaggttcctcctggagaaatctttatctatggacttctgtaccaacaattttctactccatatcagttcatttcttagtccgagagtctccgagatggctgtttgttcgcggacgtaaggatgaagctgtgtctatactgaagagtattgcaacggctgggagcagcggcatcctcatgagcttctcgaacttagaattaaggaaagagtcatggaatgtcgatacttattcagcaatcaagattctcttgaagaagaagtgggcttgcagaagacttctgacagtcatggcagtggtatttggtattggattggtgtattacggcatgccactaggccttgcaaatttgtcattcaatctctacctgagcgtcacattcaatgccttgtccgagctaccagcctcattggtgacattcttcctcgtagacaagctgaacagaaaggattctctcctcgttttcaccactctaagtggtgtttgtagcatcctctccgtcgtgacgggcgagagatctgcgaacctgcaaatggggctggagctggtgtctttcttcagtgcatgcactgcattcaacatctcgttgatatacacactcgagctatttcctacatgcgtgaggaactcggcaatatcaatggctagacaatctcttgtgttcggcggcatgttcagtccagttctggtggcggcaggaagcagaaacaggtttctgtcgtatgggatattcgggatggtgatagggatttgcgggctgtttgtgatatgcttgccggagacgaggggcaaaacaatctgtgacaccatggacgaagaagagtacaatagcacaaagattgatctacctgtggtggggtgactcgcatgcatctggaattaaaattggttttcgtgatgtttgctggcttaatggcaggtggtctctgagaagattccacgtgtataatttcgtcttgttcgtcgagcaaatggccattattgaaatgatatttgtcatatatggaatataaaatatattgctgctcttgccttatgggcatgatcaaaacttttggctggtaattacagaaaagtagtcatcattgagaattaaatacaaaatctcacaagagagttttaaaaaaggtggcgattttctttataaagtactgaagcttatctcctcgacgagcagccgtcacatggccaaaaaaagacaccgcaacttaatcttttcttatctgtttgctttcgtcatccagtcgaccactgtcagactataaaatatctccggtgtggagggcagggttctcgttccaacctgcagtataatcgtggatgactgagtttctttatcgtttgattattatttaaaaataatatgtttttgattttcttaacaccaacatattaaaaatatctaaatattttatttgatatattttaaaacaaaaaatatttaaaaaaccatataaaaacagtcacaacaaggccagcactgtggaaattatttgatattataatagtgattgtttttcattgtttggaaatgcatttaaaaaataaaattatttttgatattaaatgtctgaaaatactataaaaatgaaaaaatcaaattttataaaatgttttcggacagcaagagtgccgtggtgggaggtggagaatgaagaatgtcatgaggtccactaaacatgggccctcatttcaagtcctctggatacacgggcctggtctgttggaccgttatttaatcttccacgggcttgctccgtttgtgggcttccgctttcacatttaaacttgtccgcttaagaatttacactctctatataatctgaggtcatgaatctattatttaccactcacatatctaatatcttaaaatacaaataatttcagtaactcttcgatcatgtctggtaccgtggaatttgtggactaggaaaaatatcttcacttcgctcgtaaacatagatattaaatcggacttgtatggtgagctaatttgatctgattataagtgtacgttgatcggcattagcgttaactgaaaaacaaaatagcatgtttaagattttaatatatgtaaattttaaaattttaaaaataatttatatgaatatataaatatatgctataaaaatataaagtgtaatgcatttatttcatataaaaaatttgaaacacaattcatgtgtatgtatattatatatatatagttgtcttgcatcagaaaactaaaaaaataatgtatatggacgtagtcacatttaattattatttcacattgagaaattaaaaaataatgcacgtgcaagattatatatataaattatatgccacgctaaaaatatctgcaagaaatgtgaaacatgttcgttgaaggggtgtggattaatagtgttggttgcccacctaaaatgactagcatgtatatatatatatgtaatgaaaattaaaattatcagaccttccattaaatgacaactttatcctttcaatgacaaatttatcccttttattcattattttagattatttaattttttttatcttatattatatataagaatctagatcttatatgtagatctacgcggtcacctttcaacataaattttccttacttgccaaagtttttctactttcaaataaagattttgtggttgtttttagctgaatgtagggtatcaatatactcaatgaaaacatctggaaatgagtactaaagtaccgtgaggtgacatactcaatgaaaacacctctttttttttttcaagtcttgataattgaatcccaccttcacatattatttatttattctgttctatttgattatgatattgatccggaaacattgggtcccacaagtctccttgctgtaattattttttacacatttattaaacatcatttgatccattttgccatgcaactattttcttccaacacataacctgtcatcttcctatctcgaaccaaacagaatgtaagtttatatttgggacgaggataaaggaggtgagaagttgtccgtttaatttttacatttcttttcctgtacttaagtttggtacctaggtttggggggggaggttaactggcatagtaggcctctaaaagtatatttattagtattgaaaccactgattttatatatataaaaagcctatcggggagagaagtttgttttattttatttttacaagcaatcaggactcctgtttcttagccgatagaagatgatgattttattacaaccttctaagtaggtggcttaaatagttgcacatgactaataacattttcatgaatagtctcaccaatgagatgcatgtgtctatattcatgtatcgtactcgtcaagagttattattttactagaatcatataatgagttttgtcatttaaaaagcatatcttgagaagatttgtttcttgtgcttacaaacaaattatcttatagtataagtgggttcttacgataaaattccaggaaagactatgatagtagctgatgatttgcttttaagaaacaatgaaggagcaaaaagaaaattagttctacctctgcaaatctctctcccaaatgctgatcttatacgtgatgtatatcattttcgataaaatctcacaactcttttcgaaccttaaattctaaaaattaaaaacttcaaaggtatgtgtgtcgatctgggtgtgattgttacatgccaaactggttccatctatgcacaatatttgatttagtcttaattgtcgaaatcttatacagctcgtaaaagcaaattagtcaagtcattgaagattaacgtgaccacctagctctatgtttaagtatagaggaggctggtctttgaagtggaatcttctttgtccacaaccacacttcatttgcaaagctttcttgagcacaatggttgaaaaactgttatttttgcctataaactaatgcacagtctactcgtaatatatatatatatatatatagcactatttctttgtctaattaaactctgtttaatattgtgtttcaaaagtgattttgaaaaaaaaatattttgaattaaaaaatagtgtttttaaatcgttttcatatgctaatatcaaaaataatttttaaaaaataaaaaatatcattgtgatgcatttctgaataaaaaatatttttaaaaacaacttcaactatactccttaatatgtataagttgctttcgaggttgtagacctcactccatgcacatcgctgttgattaaatttatttcatcaatcgactgcgaaaggagaggattttatatattaaaaaggagaaatgatgactaagaaaaccataaaacagcattcttgctggtgttatttgcttggaaaaattactaatcattgttacaagaaaagcgttttagaaaatcaggaaagccatatcacgactaatcaatgcttactaattaaactttccatgacagccatatacattatcgagaacaatcaagccagctctgagtaacgttgaagatagaactctctgtgggatttgagtcttagatgatgactaatgtaagagataaacttacaaaccagctaagttaatcccttaaaaaatcaattgctgatgaatggatgcagtataattattttatgaatccctattagggttttataatttagtcaagtttcttggaagatagctagctaggtgacacagcaaagatagcatttttaattaggaccacaggaagaagtgtcgtgtatatgttttgttttagttgttttattattttttatgtgtgggattacgatcgcttcatttgaagagaacttgtgttgcgggaaaacactacttaataccaaaacaaataatttgaagaaaaacgaaaagatacttaatcattcaatttttatatatatatatttttttaaaatgatcgtgactgctgtataagttttttaagtatttttatttaaaaatatatcaaaaaatattatttttaaactttttaaaatttattttttatacacatcaaaataatttaaaatatttatcgaatccaaaaacgattaatcgattacactcatcatatcccatcaagctcgtaaaaaggaaatacaagattgcggctatgacatgaaaaagaaaggattcaatatatcgaagctctcaaccaattaggaaaattaacctaaaataaaggcatcgctattaatgtactatagcgttgtaaacattaaacgcgtaactggaaaccatggttgattcctagtttggctataagctagggctgtttgtttttcaccacgtaggacggtgaacattgcagtgaaaacactatttgtttaaaaatggaatatatatatattcccctttaaattaatagttttttttgtcttatcttgacatacagatataaaaaataaatataagtaatattttgttgttctttgagagaaaaacactatgaaacacagtttctaccgtactcttactcttaaaaaaacatttagtttaaaagcgtggtcaagattataataataaaaattgttttttaaagtgtttattacttgaaaacacaccaacttgtttttttaaaagaataatatcaactcataagaaacaaaaaaataattaatataaaaaaatcaaatatttataaaaatacagtgtaagaacctagtgaagcaacaaatactgaaaaaacgacaaaatatacagtgtgcaaagatattaacgtttgcttgagaagttaatgtagggcctggaaaagaaaatcatatgaagaaaacatgttttgttcattataggactccgtgaaaatgtaacgagatgatggaagagcgatgaccgaagaggagaaggacaccaacgcactcaattagacgtagggcccatgagtgccccttaagtttaaatcgcagcacattttcgacttctaggttcttttgctgaattgttcaaaggacagctcctcctgcctgctgactattctaaccagatgaatgccaacaagtaaccatatataatacctgccggcttgccagagatactttaacgacttgatagtcgggctgaaattattttttaaactattttttatttataaaaatattacaatgatttttttttcaattttttttaatatcagtatatcaaaataatttaaaaatatataaaaataataatttacaataaaaattaaaaaaactcaattttttttaaaaaaacataattacatacagggtgggtgttagtctttctttcttgcagtatcttctagccattcaaacttggaagcttttatcacaacgtaaattgaaaacgtaaattgaaaaatgagtttttatttatataaaaaacaattttaattaaaatagtaattcaactaaccacatccaaaccacgtgtcgatttatctatcagtcttaagactaggaaatgcatggaccgctaattaacctcccaaaatgtgttagcgaagcgcatttaaatggacaaccctccatactaccgtgtgtttcaatttgccaggtgggggcgctaatatatatataaaatattttgttaatattaaaataatttaaaaattaattacaataaataaatatattagaagaatgtcacaatataatttttgtctcgcaattctaattttgttttaaatgatattttacgattgttcggggatcacaaaggccttcagatatagatttagtttgggatgaaattacaagtagtttggtgggagaataaaaacaagtgtctaatttacttgaattattaatcatattttttttattataattattaaatatttaaaaaacaatatatatatatatatatatatatatatatatatatatattgcacgcgcgtgttctgtaattcttgcaccctatattgctcggaaattaatgcacttgtcagtcgccgtatttaatttccctctaccttagcttgttattccctcaggatcgggtagatgtaagaacaggtcgtgcctagctaactaaaaaataatcctgtgcgcggggctgcatactagtagcagccaaacacatcggatataaattgaggactttcaggggagaggagtgatgagattagtccctcgacattttatatatgttgaggtagctagctagttgaaggatgcaggagtagccagccagctgaatcagctgaagaagggagtagtggagaatatatagagatgggccacaggtgctgcaacaaacagaaagttagaagaggtctgtggtctcctgaagaagacgagaagcttgtcgaatacatcaccactcgcgatcatggaagctggagctctgtccctaaatctgcaggtatgcacgtgcgtgttgtttttgcttgcatcagagatcaaaatcaagccgtctgatctgtttttgacgcatcattgctctgtgcttgcaggtttgaaaaggtgcggtaagagttgccggttgaggtggctcaactacctgagaccagagctcaagaggggttccttttctgcgctggaagaacaggtcatcatagatgttcatagaattctgggcaacaggtaaggattattcgagtcaacttaaataaggaagtactgtataaaaaggtagaaaaaatgaaaaataaataaataaaacactgtttctaacaatggggaaagtagtctgattatatattttgtcactgcattttgatttacaagctagagctttatacttgtaattaacagatgggctcagatatcgaaacatctcccaggaaggacagataatgaggtgaagaatttctggaactcgcgcttgaagaaaaagctcatggcacaaggcttggacccgaaaactcacaacctgattcctactcgccagagggcagctaattataaggttgcatgcagcatatcaccatctaaccacgaacccttttcaattacctcccatgattcaaagatgaaagatgtttccttggagataaaccctcctgttctaacaatagtttcacctaattatccttctaattgcagcatccagcctccattctttcaaacaacaacgagcttgcccttgcccaaatcttgttacgataaccctagtgtcgtttggaatgtaaattctcaaaattcttatgattcatcccttttcacctgcgtgtcatccattgagaactcactcgcttcctcttcgtcctcgtcttcagcgaacccaactgggtttggtctcgtggatgaaaactgcttttggagttgtagtaacattgttgagccctttgaagccgcaaaaatattcgaaagtgtgccgccacaagatcaggaaaaccagctgaacaaggtttgtgacacccaaatcatgggtaagaataaaggagttcatgacaatatggaagcttcattcgacacctctagctatgatcttgggttggtcgactccacattatttcctggttcaatgtgtcatgatcttagctcaatggatgatcttgcatggaacttttaggcctccatatatatgcgtgtatgtacctcgtgctactgtaatagatagctggttttgctgaggttgtgcatcccaaatatttgaaaggaaaaaatgctcttaaaataatacaataagaacacgaacaaaaaaataaacctgtgagtgtcagcaaaaaaatgttttttattgttcgattcaattttacatgtactagtatatataccatcctttctttattgatcattattacattataaagtttgttatataaacacctgatgattttttattttattttcatatgatgagataaagatatttatagatatcttttgtttatagaaaataagttatgttttataaataaaaaaaaaacttctaaaatagttttattatttaaaaaagaaagcttccatttctttctagaatttcgggagtgaagttattcgtgatatgaattaattcccatttcatctaaatttgggaagctgctctcggatgttgagtcattgatagccatcgcctgaatcaatttctccccccgcatgttcaccaccatcccttgagttttgatggtatgagaacattttgattaagcctaattctatagttgcctctttatccgtgttcatccatcagttgtgtttttatattttcaattcaatcaatttatccttataaaaccacataaaaatatatagatatgagttgatgctgagagagtgtatactagacggtgataatgatggttgatattttatattaaaaaatatttttattatatttaattgaagtgaaatttaatcttgtattgccaaagatcgtcagatagtgttaatgaaaaaaaattaaaaaatcatttttcttatttacatttagcatccgtaaatacaaatatttgaggtctagtaggtagatggcaacttaactgggccttcagcttactccccaggccactacctgatagatcggttctaatcacctaacccgtgatgattgtggtgccaaagttaccaccagggcccacaataacacagccatcataaggcccattatttcgttaatttgatctgggccatataactttctttcttttctggttccaaagggcccattatttcgttgatttgatctggcccatatcactttctttcttttctggttccataggcttgtaggcggaagcagtccgcatggccatggcttctctttcggcattaagagatataactaaatgatacgagtctccgacctcccacgtccagtatatcccccctttcgccattttagccaaagcttcgaccttcttttctcttctcttctcttcttcttctttttggccgttacatatccagtagctttattgaaaaacagttggtggcgatttagctcggcatcaagactattattttttattttggttgaataagcaacttaattatcagctctcaacggtgtaaaattatggagtccccaaagttactgtgtgagcattgtgggctcacatcatgattctttataacagagaattcttttgtgcttttactttggcagaaacaattggttatgtaattccacagagaaatggagacaatctctttccaaatattggcccagaagtttcaacaattccatgaaaaaagaaaataacagaaaaggaaatgatcttgtagccaagcctgatcatcatgtggttggcaaaacaatccccgtttttttttttatatatatatatataacccatcacaatatatcctaccttcgtgtcaaatgaattttagcagtgatacaatgtctgcaaggaacattttcttaagaaaaaaatctttgttactttgtggtcatcctaactggccggtggctcttagtattgcatggggagtgcagtattggagtcataagtagaaattttcttcaaatatcccgttcatgcaatccctgtacatcatgtagtcgtcgattatttcaggctttgatggctccattccgtccgtgaaaccaatctgtgggaaatccttaagttctaaaggtgggaacggaaattgatactgcaagctcgagcagtttggcatctgcatatcctgcatccacaatatgttgtgtgattaataatcggcctcataccgagagagaattcagcggggaggtggagaaagcaactccacctccttttgaagattattgttgagtaattaaattaaaaatgtaagcccagcaacatgttttgaattggagatgatttcaaaatgtgtttcaagtgggggaacatgtgcattggaagtagtgataattgtggtgtcacatagagtagacccagagagaaaaatcaggaagaaagatgtttgaactttgaattatgttcgagtcagtcaaaagaagttattgaagatggtgaaaagaaagctagttggagtcagtgagagagatttttagaaggaagctttaggaaaagacagggagtttcatggctttcaacttaagatcaaaagaaagaaagaaactcaaagggcttgtgtcgtgggccattcccagcacatgctggccccaggattgtactttcattctctgcgtgaagcacagccacgtggtattttccctggtgtgaacatgaagctctcgcaacagggcagaatatcgatggaaatgtggtgctagcaaaagagatgatcagaaaaggatgagttggagaagatgattgttgcatgtggatctaggcgtggcccatgccatcaatggcctgatgtttttctactgtctttccatgtcacacccatctagacatattctatatgcagtagttacctacatatttagttattattaattactattttttggaccgacattaactatttatcgaaagatcatcaagccatcaaaaaactaaaaccaacgtgtaaaaggagccttgtttaacgaaccagaattattatgtcataaaaagtaacagtacctgaattagatttgacgagaaatccacgcccatggaataaaggctagctgaactaatggcctcatcggagggaaacggaggttgtaaatcatcgggcatcgcagtttcaatcggagtcccttgagtgacatcggaggaagatgtttccgatggaaatttacagtagccattgttgaaattttcatctcgatgatcagcattatctctccctttagaactttcaatgccgctaactgtgtcgtcccctaataattgcacttctgatgataccgccgccgcatccttctccttatcatttccattattttcttcttctttcggttttggaatatgtattgttttcttgaaaacacggcataatgcgtaggaatcctgtggtgcgcgcaagaagagccagaacttgttaaagaggcagtgacaaagatctgtaaaagcaagatcacaaagagcagaaaaagaaacaagaaaccaagcaaagatagcgcaagtacaagtaaagtcactaaacaaagactctttcatcatcatatatgttgatgataaggtattctttattaaagagagataacatttagtaggaaaaggaagatctaaaaatgatttgttggtgtacaaaaacaagagcaaatgtgacaagatctctgctctatatatgtgtttgcatatctgtcatataaagaagcataatcctgtatataatatgctcttaaaaatattaatgtttttctaaatcatttgattatttgaactgaaatcaagaatctacttggagtagtaaaaattaatattaaaattaattaattagacatggaccactttacattcatcttccttgctagtactagggtttcctgtgagaccaagaactctgatcttgcagccgcgtgtgaatcctattgaaatatatatcttctacacaatcaaacacgtacggctgtctttttgtaaaccctaattaatagcctctcactactggtctacatatgaatgccaccaaaaccaccagatcgatggggcagatccagctaattcaccatgatattgcatggctcattgttcataattaattcacctacatgacatttctggacataattaattatgcaatgggttaaaattgtgtccctacttgattaaacttctgtgcatgcatcaaatagaaatcgtgccgtaattaagtgcaatatatacctttaaacttgatgatgcggcgccgcacaatgatgagtcgatcaagcgatactcgtgcattacccagttggttctgatgccatggggagctctacctctatagtacaccaatgtcttcttcatgccaaccggccgcttctgcgagctcaccggtctgtctttccctgtggctttccagtaaccagcttttgttgccctgttcgttcttgacccattagggtatttcttgtccctggggcttaaaaaataccactccagatccttgctcggtaaaaacgacttctctgttgatcgaatcatcacagaaaaaagaaaagaaaaagttgtcaggtgcatatatgaggtgatgctgaataatattgatgatgtcggtatggccggagctaattacatctgtaaagcatttacctggcaagtcccatggctcacatttatagagatccacctccgggataatttcaagctcaactgtgcggccgttgatttttctatcgagatagtaaacaacgagctcttcatcagttggatggaacctgaatccaggagggaggctcaccggcgccattgctgctgtgacagtaattgcagagaggtggcgggggggagaggtggcgggggggagaggtggcgggggagagaggtggcgggggggagagctaggggagggcgccaagctgatcgaagaacgtctggatcgaggatagcatgttagtagtaatataggacaccgttttgttatgacagagatggttgcattaactagcccttcaacttctctgtatattacgttgctgccattcactcgagagacctgacatctttaatcaaacccccctgtccctcccttgctacacctatcaggaaattaaaaaatgtttttagttaatttagaagaggaatattgtggtgtgaacagaatggttagatttggtattttatgttttgataaaatgaatttgggagacgacacaacaggtccttcgacttttgaggattctgtgtgaaaaccatcggggaggacaaggaggttccctgcttttgtctgctcacaaactggcaaaaatcagaggacccctcgaacgaatgtggggcccagctggaccgtccattccatagtccataccctacagcacgcaataccaggcctccccttcttattttaataaacaccactgtattataatgatttatctttcaatttttttttcataaatgtgtttttgtattgttttcgatatattaatgttaaaaatatatattagagagcataaaaatattttaatacatttataaataaatggaagacgttttgaaaacaaccactgtcgtgataataaaaaataaataaaaaagagagggtggcagtcagttagtagcgtaaaagaatctgatcgggaacaggatgatcatgtgccatttaccaaaaagcaacgtgatgaccacctcatgttctctgttgccttggatgcatacagtgagatggtgtgttttttgtaagtttcttcaaacgttgatttcttttttcttttcttttttatttaatcgatgatttttttaatagtaatgttaaatctcttgagtgttgcagctggaaattatgatatattcagccgtgaaatctctcttaaatattttaaaacggcaaccatcaacttagatatttcatagcacgtgaattgtgctatttaatgtttcatcacatttttcttaatttcattttaagttatttaaaactttaatgaaatggatgtttatgatctttaataatttatcattaaaaaaactccaataatcaactcttaaaagatggcaattctcttattgaaaggcagaagtgtgtatatatatatatatatatatatatatagtctaaatatgatatgtatattaattatgcaatttaggcactatatatattgtgatttgctgcatggatatacatttctataggtgttaattgtatatttaatgaattcacacttctagttaaaaatacgattaactgatcatggttttctttatgcatcctggttaataattaacagttgttaataaaaacacgattcgacttgtgatttatttatttatttattttgatggtccaaatgtgaatgcctttaatttaatgtgaatttgatgggccatgagatgggcccgtttgaaaattctctggccttcttttatttccagatagaaaggaacacttttatcattcaacagtttgatgaattgaagggggccgtaatcatcatctgagaagatctacctggcacaccgtcacagcctagagccctagactctctttttctttttgttatttttcgctttcttttcctgccatccaaacgacttgtcctttactgttttattctgtttcatcttcccttccctttgattcctttcctttccttaaaatatcatttccatatgagtaaagacacacttcctcctttaatgattacagacccaaaatctttgactgcggtctggtctctctcttctctctcacgcgccaccgcaatattatcgatcgatgcaatcttatacatataccagctattcccccatcaaaatatatagcgcgagggtacgttctgcatgcatatacactcttaataactccacagctaaccatttaaaattttaaagcgcataaaaacagcatattatctaagctatttcttccggtcgacggtaaaatcgtacttgatcggtaatttatagatgggcagacccgaatgaccctctagtttcgaggcccaccggagaaaacaagtagtatatatttatcaaaacggaagttactaactttgttaatttagggttcctttcttttgtttggatgagtctttatggtagttacgctcaaaggtggatgtaaatatttgaatcaatctctgtgcaagacaattacatcgagaaagagagaggtgtggggtttcaaggggtttgccgaaagatccttttacattctttactggctagccgcactccacgatattattcaccacgtaatattgtagcatagatacagtactagctagcttcaccctgtgtatgaatcaacatgcatgaagaagaagctttggattagcgtaaaagagattccgagttcttctttttcaccaatgggattgcaaaaacatggtggctaggcgctcctacttgtaaaagaaaaggaaaaagcaacttgatccgtcaagctcgaactagaagtagtgcccacattttgattctcctatgcagttgcataacttgcattctttattaattaataatttaatctagctgtgtttctttattttagttgattttccctttctcaagaatgatagacactagccagtggtgttcttatgttaaatgggctctaaagccatgcaacctttcacacgatctgagtgaagtaaagcaatggaaaacacaagagatcatgcatggatcgatgcctgggtactgtgatccattaatgtagctgtagatcgatgacacgtggtcagctctccataaagaagagaaagagattctaaaatgtcggctcgatattatatatctctagatgccatttcagtctgtgcatgcaaaagacaaatgttcagatccttcttccattacacgtaacatatacgaggtgtagcttttatggtatagctgctgggttgcctccagttcctgagggcacgaatgtcatttggacattagtttctgacttggcatgcagtagctttgaaagcatcgtcatgacctcctcgtccatccttttctcccgtgcccaggagcagccctttgctgaactaggaccacgcctgtcagcactggtgggatttgaaagggaccattttcattaattcttccataagaagcagcagctgcttctagtcaagaaagaatatgtatggcgagtggacaagcaatctagtcagtgtaatgatctcttgcaactataacgagaacctagctagctactcgaaaaatctggtcattctcggactgtagctaactagctgttctggagtagaagaattaacccccgacaaacaaaaatacattattcctcagcaaataaataaaatgcagtgctgcacaagcacgataagatttttcattccagggaaatcaaattgatataaaacaaatagtgaaggtgaaaaaagatagcttccacagtctattttcttattctgaaatgtttttttgatgggtgaaataaatcagtgaagtgcttttctatctaaactgactagaagtgacgcctgcagtgcatttcaatcgtggcaacttttatttattaatgaggttagtgttttcctcgttctattggataacttcaagttaacgaggatcgatttctatcctgccatattttctctttcatttgtagctaggttcaaaatctcaatgagtcattatgaatctataacattttctctttatatagtccatccattttaaaaatatttaaaaaaaaatgaatttttttatttttattttttaatgtttttaaattattttgatatggtaatgttaaaatatttttaaaaaaataaaagatatatttttgatgtatttataaaaaaaaacactttaaaaaacagtatcaactacactcatgaacataccctaagtgttatattagaattgtgttttgaattattagttttttattttaaactatttatttttttatttttttatctctttgatgtgttaattttgaaaaaaaaataaaaaatactattctaatgtatttaaaaaaaatatttaaaaagcaattttgactctcgaactttatacctcttgcagtcttctaatccatttttatcaaccattggatttcaaactatttatcacgatattgttaattcacagaaaaaaatactagatctagtaattttatagttggttattttttaagtttgattttatttatttaaaataaataaagagatacaatcatgtgatgtttttattattattgatagatcgtatattttatattttttcctcctatatatatatatgtgaaataaaataggttgtagaaagtaattaacagataaataagtatttacgagtatagtgatagttgttttttaaaatattttttgtttgaaaatacaatcaaataaaatactttttattaatgaaaataataccagcacatcagagtaatataaataaaatatttttgaaaaaaaaaataagtttttttttttaaaatgctattcaaactttgtcattaaagtgattttatcatccaataatcctggcccacaagttagttgacatgtttgctgtccgttataccgtgcccaaaaataccaagaaaaaaatactggcccaaactaaattacgcttcattcacttttctgggcctccctatcttcgcttcaaactgcaatggcgagcccagatagaattgctcgtttagtggagtaaagcttcacccagtcgaactcggattgagagaggggggtggaagatgtcgatactgtgggagaagagcgaggcctggaggtggatagtgaggaagacgagagactcaaagccattcttcttcacattcgctacagtatgcggtgtcgttccaggtgtgattgggtatttcgtgatgcaaaccaccaactctagcaaccccgagctcgaagcccgcctccgtcagaacgcccgtcccgattcccttgtacgtacgttatatatatcttgaatcaccgttgattctctccataaaaacgtttgatatgcagatttttgggcatggcccacgttgtgattattaacattttaattcccaattcttttgttaactcggttgttttaagaatctgaccctgaccctgatgctatatttacaagtagtttagcatcgaatgctagaaaataatatatgaaaagcatgttaatcactcatagatatcaagaggaataatggaaggggggcaaagttttctgggggaggggtacaacaattagcataaagttgcaaactaatcactggaaacttttcatcttggttaagcttccaaatttcaatacatggcagatggatttcacaactaaggccacttctaactgaattcatcgtttggtaatcacaggaatgaaagtgcattgcagtgacctcagagtagctgctctagatacttaggctagttcctcttcagtttctgtctcatatcctagaggtatattgccccaaaatcttggatcatggttaaacaatcttaaactgcgttatctttacttgaatttaagcaatgttagacctattattttgtgatgaattcacatggtagaacttgatttttaagtagtctcgacattgaaacggctgtttttattttaataaacgagtttaattctactgtgattgtataaagcctttctcatcttcaaatggaatcacttgttgacaaattttgcttgctcgactttctcaatcagatgatgggtagagttaatcgagagagactagcagaataccttggcgagctgcagcggaaagaggatacaaacgatcgatatgtagctgctcttagaggggagacatttacaagaaacccatatgtaagaatccagccaatacccaagcagaatagcactgaagctgacgatcaaaagaagcagattgtttgatggttctcgctgatgtgccactttctatatttggtatattaatgccatggctgcacaagaaatgcaaaatggtccctcttcttcttgttacgcaacagcttgtagcctgtgttttatttggaatatttctgctctggtttgttttttttatacccgctgggaatgacaacagtgtatttcatattgtgatgtttctgatttgcttttgcatcttgaatccaaaatgcttctcagctatttgcagtttcttggtagttcatggaaaagatgatgttagtgcccaggcttgattccaggcctggctttcgaggctcggaaagaagtgacatgttttaatttcaaagtttaatgctggcaaggaagttgataaaaacagaaattcatacagctttaggctaaagcatctgggcacattcttaacttcgggtcaataatgagcaggtgtttccctctttttgaaaagcaggtcaatactgagcaggtgtttccctctttttaaaaagctctactagaaaataatacaaatcatattctagaagtttacttaacaacttaaacttttagataagatatttttttaatatgatatcagaactatattgactcagcagtcacgagttcaaatctcaatactctcattttatttgataaaaatcaagtacaatgtacaataaatctatatgcaagtttcaaactcagaagatttttatttaagggttgtgttagaaaataatataaattatattttaaacaactatcagcttaagctattagcatatgattagtgtacccagggggctaactccaatattggagttgaggaggttaaagccgtgcaggggttggcttttgacatggggaatcgcttcccagtgctgtaaataatattctaaatttattggagatgaagtgattccagaagctaaattttgcagcattgcaaatatacatcattctcaacctaaaaaagaagtcctgcatcacatttagaaacagaacaatatacagagcatagaaatctaactctgccttcacactcgaacacgcgctcatgagcttacacaaacacacattaaaagggagaaagacaaccacatgtacagttcaagatacaatttccttgatccagtcgttaagcatacagcctgatacgactggtgatcggctggcggcagattgggcaattggatactctctgtccacagtctctacaggtctacaacccagcaacaggtattagtatttgacactgtatttgaaaaataattttatgttttattttaaatttaaaaaaaaaatctatttaagtcattttcatgttcatattagaaataatttttaaaaaataaaaaaaatattattttgatatttctaaaaaaatatatttttaatagcaactgtaaacacgttcttaatcaatcactaaaaaaacaaagttggcaatgtttaggtggcagctcaccatgtgcccacagccaaaggccaagtcctttccattagtcaggcaaatagggcaggcctgtaatcaaaatggaagattggaaaacaaatatttcaaagttataaattatcgacgagctacaatgttccagacaaaaagacagaattacacgagattattttcaaacctgggttctttcatcgaggaccggagaagaaacatgggatggttcgcgatctagcactggacgacgggaataaggaactggaggagggcgtggtactactgtccttgctcgtcccaaagaacgtcttttctccgaaagccatttgaatgtacgagacaacacgtaagaacaagttgatggtatgcagaaaaaaaatggtcagtgcattaggatgccgggaaacgtaaaaatggaaacccttccattgttgttttctcatttgaagtgaaaggacaggccaaccaattttatttatgcacagatttgaaccaagacgtgctgaccagttttagaattggctccactgctgatggtttttattttgaaattttcaaatgctggcaatgctttagtgtggagcagtgaataaacaagtttatcaacctacccgataatacaaagctcgtcagctgccttatactggaggggaatctccatcagagcagctagagcaaaagcagtttctttctcagagatagttgtgttttttgacattattgcagtgaaattaacgaactgcacacaatacatgttgataaagtgctaatatgtataaaaaattaaatcagaatgttggatggaattcgagcttaacattcattttgtcatcactgtacctgaaaattgtcaaattcacgtgctgggattttgtcatcaaatctctgcatgtcttcccatggtccatcaccaactccaacaagaattattgaaagcgggtatgaactggttaagaatatcataaggttacacattgtaatagcttttcataaaagaaacggcaacacatttcagtataaacacgacaccattttctggcattgttaaaatctgatgattgatgtcatcagattcaactttacacccccttactgctgatacaggttgactgacatgttcggacactaaacaggtaaactcgttgcaataaaataatgttctgtgtggaccgagtgtttttcacatacaaatgcaatatcaggctagcatgacaaacaaataattgaataacaagctggttatgatgcaatataaatctgtatacgtactaggacctaaaagtagattgttaaccccttatgattcatttgatattttacaagtgcttgacatcactaaatgggatcacttctcaataaataaagacagccatcagttaaccaccttctttttatgcaactgcccaagtcatatacatctatctaggcaagtcatgtaacaacagaagctctaaaaagtaatagttctaataagaacctaagtttgtcattttaattagatgaaagttatcatatgaccataggatatattttctatgaaagttagtctaagcaagtataaatgatttgcatttatctttaaggctcgaccttgcatcaacaattgccctgattgtttgctcttcttgtggactcatttctccatcgcctgtattcacacttcttgtgaccttcacagtaaaagagactattacttcgattacatatgcatccatacatacagaaacaaacacatgcaagcatgcaggaaaggagagaggattttaaatttcaaacctggccatctgcaatgatgagcaatacatgatattgacctttacttttgtccacaatgtcgattgcagcctcaatcaccggtccatacgaagttggtccttaaaaccaaaacatatatatttgtgaagatttatttgactcgagaaataagtaaaacacaagaatctttgtagaagtaatgttcagccatcattctaattaagtaaactaaggagttgataaaagaccgaattgcagcatcaaataatcaaagagcaaacctgaaagtcgcaagtttggaacaatctttttgtagcatgccaggacttcttcaaaaccatggcaagatgaatgatcactgtgaaagctaaacacctcttgatcatgagtggtggctgtatagatataataaatcaatcaattcgacagctgaattataaggggcaaaactagaaacaacattgttagaactcaacttccagggactgaacctaccatcgccaaagccaaaacaaggaatgaggttgtcttcatcaaaaggagccatcgtctttccaataatagagatggctttctcgtatggattaggtgtgtctccgatggcatgaaggcaacgtttattgaatgagacttggcctttaaaatgaaaaccagcacattgacatgcatgagagacaagccaaaacacaaaccatttcaaaggaacagaaaacacgaggatataatttaaatagcctttttataaccattccagtccttagtatatgattgaatcattcttctatattattagattgcctccttaggtttttaaagattggtttttcagctctggatacttatttcaacttcacggaagtctcaaaatccaaattcctgaataactgataaagtagaacacaatgcttaaggtacaaatcgacgataggatgacttcacttgcacatacctgtccattcattgcttttagtgaaatcaattccaacaatgagattcgatgattccagtccagcttccctcaaggctttcgtaacctgtaaaagagggggaggggggggactgtgagagttcaaccaggtagccatttttattcctatactgaagcaacaagcttctgttatgaaaattacgtacattgctagcaaatgatttccattcttaataaacaagcacttcaaaacaatacctaacgtttaatgccagaacacatggtgaacgtttgcagaaggtttacagaaagctctgcgtgtttgaagtcgcaacttgcacctcaccgcttaactagtgactcgactagtggaatttttttcttcgaatgtatttctttttgcaggataccggtctaaaatgactataaagttaataagaatacaattctattattattattattattattattattattattattattattattattattattgtgtgagttattttatgatattttcgtaatttacctaacttttgcactgtatttatattcaaaatgaatcgtgaattttaaacgactggcttctcctataaaaataactctgagaaaaaaatctgaacgagaaatttcactgtaaaacaacatgcgtagaaaagaaaaaataattgatgaaatttgagaataaaaacggactattttaattatttaccctgttttttttttattttattaataatataaaaaaaatcagcccgtcaattacttgaacagtttcagtactgcctggggtcaccaataataattgatgaataaaaaagcttgcttttctttattatctttatccaacttccacgtttccgttgagtgaagaaagaaaccgtgttgacgacgggatgacctacaacgcgttcgctttattgccagtcgttgtcaattatggcccctcttctcgcagggtttcaaaaaaaaaaatatttttatattttatttttaattaaattattttaatgggttaatatcataaataatttaaaaaatatatattatttaatatatttttaaataaaaatcaattttcaaaacaaaattaatcaaacaattaaacatattcattaatcacgtgagataattatttatctaggtagcgagaggcctagagtacagtcaaaactttgaatacggccaactaaaaaacttcaagactgggtcaaattaagtgcatacatcaatattttttttctcttaaaatatatataaatatttttttatttataaaataaacacattaacattattaaaaaatagtaatttaatatattttcaattaaaatatatttttaaaacacgcataaacaaacttccaaacaccaaaataaatagtggctaagtagttatatcatttttttttttactttggtttaaaaagattgtactctcaccgtgataattgggagttattttaacaatgagtgttatttttatatttagtagtgatttaagagtcggtcggattaatttttttcaaatttttgttttcttcagaaaaaccattaatttaatattgttttaatgttttttggtgttttaagatgttgatgtaaataaataaataaatattttaaaataaaaaacattccaccctaatttcaaatacataatctccacgtacaaagatgcataagtagtgtttttgtgtttgaaaaaaaaaaaacatgtttcatcagtgatggagtgaatagaaatgattgttttttaatttatttatttattaaatacaaaaaaataatatgttaccagtttgggtaaaattataaatataaaagcacctggcgatactttgatatgttgaattataattttttttttgaataacaacatttgaaaagcaaacggaacttttggagttgagtggagtggagtgtgcaagctggtaagaagattcccccgagatgccgtcagagaaaagtcaaatcagaaaaattgactaagctttttgtatttcggtttaaattgacatcagcgagaatttgaattttaaaaaaaaaaacaaattgtaattgtatccgacagatggggggtcggatacaattataattataattatctattctagaagaaaaaatataagcaaaacttccaggaaatgaaagaaaatagttatgaggctcatacctgttctagggaagtgaaattatcagggatgaaactgtatttctgcttgatggattgcttcttatccaatttggaaccagcctttgcttgacttttagaatcaccgccggtggcactagcagtattacacagtgacgacggtggttcgctggacat

SEQ ID NO: 43 - DNA, 85256 bp, Populus sp.
agaagggatgtgccaaagtgacgccatcaaaagaaatccacaggcatttttagtgcgatccaggacctctgttccatgataagaaggtaggatcaccaagccgcctgagatgacacagtaaagagaaacagtaagaaaatattaacatatatctcacaaacaatcgaatacacatagcatatgaaaattttatgctgccgactatggggccatgctccacaagtcagagcctcactccatatatgatgctgggcacacttccaaatcctcaccataaaatgcaagccttatgaagggcaattctaacagcctcactctttcaaaagccgtgacgccgcacacttgtgacagcgtgcattttgactttaataaccagtttattaaagtcacgagaactaggctcctaaattcaagaattaatttgtatctatgatcaacttacctaggcttgacaaaatacacaattgtgaaacccattgacaaggcgaagcatatcatcccaacagtgagataagcaatgccaagaaagtcatttcttccaccaatccagcttgtagttgaaagcacaagtttcttcttgccattaaaactgtatgtgttatagttgttacccagtgtaacatttatgacttcttttgcatcaagatccacctctatcttcccatacaactttctaaaagttggcagagctgcagttcgcatccaaaccatgaggtcctcctgatcgctcagctgttacacaaaatcatataagaccaggtcagtcacataccaattacttgaagcaatttgcatagaaagaaacacggagaaaaatttatggttctctagtatattttcacgttttagcaatagaagaggggaaatgacacgcaacaatatctcatcattttaagcatttacaccaagtctctcacgtctccaaggtataagcctaatactcaacaccttgggtttaaaaaatcaactccttcatgaatgaaagaataactgaggtcacatcttcaatactaatcctgaagttgaggttaagcaacctgaaaataccactctaataacacaacagcaacgcagttttgaaatctaccaatgtccagagtgttattaacattattaaagcctctaaaggtattttccaggatgaagttagaacagttatttaattagttatttagttagtgataagatgagttgcttatatattaatttgaagtaatagtaaagggaggcttacacgtgttaatggatcgagccttgcaccacctacaagacctccaccctgaaagtttttaggaaagacatctttaccaaaccttttctccttatcactcttccaagcaattcccttcttattcactgtcaacgactggttcaggcgggagaagctataggtatcattaaacaaactccaagctatcagaccacagggtacaattgcccccctccccgttgcagtatcttctggctcacaagaacttgtatcattctctttactcgcacttttcaactgttcatcacttcggctcttcacatacctgatttattagagcaatcattaaaattatgccaaataatcaccacataaactcaattacatgtgcttcaactttcagtgagtaagcatcccagtttatgatcatgataatcatgacagtttcacactgttcaatagtttttataaaatgatgggttgctttcattattaaacacttgaaagaatgtaattttctaccatcaacaaatagtcaaacacactattctgagatgagaaacatgatattaaccaccaattaagcatgcatagaggagccctttcctcaacgtgtaacaacatcctaggtcctaggctgtaacgtctgtaattcttgaaaatcacaaacatcgccatcttgacttataaaatgtggcaggaaaatctaaaagggtgcacttcctgaaccacatgttataattggttctctggaccatcacctatgatctacataaattacgcgcctggatagtcctgaatatcaatgctcccaatttatatgaacaatatacctctgaccattatgtaaaaatctacacatgattacttgaacccatcagaaattatatgctgatagagtacatgaagttgatgacatacctacgatgattctggtagaagttgtcaagctgatagtaaacataaataggttgcttcatacgcttagggatctggcaagaaaaacaagagttgagaacagaagatcgttatttactgcttaacctcaggtcatgatggctaatttctataattagcataagtcatgttgcatgcgagaaaaagatattggcatgggttttttgtaaggagtagcataaagtaacctactggctactaatacactgctgatatagcaccacttacagctctgacaaaaagggaatgccaccagtgaacagataacaataacatgaaggtatattgtataacagaaaataatattggcatgggtctttccttgttagcttataaatccacaaacactgctaataaagaacatagaaaatgacaacaacacatcaaccataataattgcaagaacaggacttaccgtcattgatattgtgcatgttttatcagcagcgctttgtataaattggacttcattgcctctatttccaaccggaatgcattctgtttcataccgtttaacaacttcaacaacctgataaaaggaggataacccataaaaaaccataggtggaaatataactagaattgcaaggatttaggtgacactagagctcacatctcgggaaccaagcaagcaagcaatgccgatagggatgaagacaatggcaacaagcatgaatgcagacactacctgcacaaagagatatattaggagttaataactttgagcactcatttgcatcagacgaaaccagataaaaagaatgataaaaacttacccatcgtggtgtgagaattggcttgcaagcaggaagttcttgttgagtaaactttgaatctgaaagaaaacgaaacatttttagttccataaaaatcacatgtacacccattacccatatgtgctcgtgtagtgaaaaacaatttgtgagctgtgattgaaacatcagataaagaagctgctcagctgtgctctctctatttttacttttcttgttttttttaacagctacactacaataagattacaagtgcattttaataaaatgaccaaaaatcgcagattttttgctctggcaaatacaatacatccctataaatttaaaatgttttcatccatctatcttgctttgcaggataacaattacgcagtcaggcaactattctgaacactggaaaacattctgttttcaatcttactgtagatcacatgagcatacatgcttagacttagatgcatgtaatgataatacagccaaaattactaaaattcttattcgtgtaatggaaaaatgtccaattatctcatggcatgttatagctgagtttcattaatatcttgtttatcaaacccaatttagttcattttattgctaacaaagtttaatagccgtatttctctttcaaaaggggaatttccaaatatatcttgatgaggaattaaaaaaaccaggtaaggctattccaaaaacggaaagactaaatgatcaatataaagaaaattagattcttaatatgaaacaaaataatcaaaaaagagctcacacgaccactctcatgcaacaaaaccaacagcgaatcaaaataacaagaacccatcaaaaatatgcataaacctccacatggatgcctataaaacccactagtgatcccaaaaacattcaaatacctgagtctctgaaacaaactaagcaagaaaattaggacagggttcaaaactttgcaatttaaaaacacaactaacaccatgatcacaagagggcagacatgaatttgcccaaaatagaaaaaaaaaaaaaaacgagaagtaaagaagagaatcacatttgggtcgctttgaattccttcttggagcaccagaatcacccgatccgttgcctccattactggaggatgccgtgtggctactcatgattgtgttaaaagatgcaagcaagcaagcaagcaaacaaacaaacacttgtagtttctgtctctctttctttctctgaaaaaaacaccaaaacaaccgaagaaagaaaaaccttaacagagaaagagagaaagttcagaaagaaagaaatggtggaaaagactgtgtgatcaaagaaagagatggactttttaaaggctaagcaacagagaggggaaatataaataaataaattttctagagagtcgcagtatatggttgaattgaatctgcaagtttttgtttgacttcagaaactgaagaggatgtttccttattttctctcactagacatgatgagccctcggaaattcctccctttctagaaggtgagtttgtagagagagagggggaagcaaataaaaaaatgatagctttattctagacccttaagattcgaaaatgtttcatgtaggtcctcatcgtcaccaacctaaggttcagaagctttcaatatcatctgtaaataggtattagctggcaatgaacattttcgaagccacgttgagttgagggacttctcaaaaatcgctataattacatataaaaacattgtagggttatatgtaattgaccctttaattgaaaaatccatagaagagggttaaatttatagtttttttcaaaaaaaaaattatgtataatattacagcggctaaattgattaaaaacaaacataccattccttttttaaaaaaatgcaatcaatttatttgatggtgttcagtaggaaagtaattatttttaaagtattttttatctaaattaaaataatatttttaatataaatgtattaaaataattttaaaatattaaaaataattaatttaaagtgagaaaatttattttttaaaaaaatacggtagcactataaaaataaatactacctttctactgtacattattttttttatatctaatttaatttttttaaaaaaaccctttcctcgtttaacttttattttccttctttttttgtgtgtatttttttttttaagaatcttgacatgatattacttagatccaaattttcaatggatcataaaatcaaaataaactcaactagattattttgtttgtagtttgattttttttagtgttttgagatctcatttaatttttctaaataatttaaaaaacaattaaaataacgaactgtaagtttaagttttttaattgactatagtgagaataattggtgactgatttttttttaggacttcgtggttgttgttttggaggtttttatgagtggaaaaaagcttcttattctgatgggactagaaaaatctcagctcgtcggaaatggcacaggaaaaatcttcactgctatctgttaattattactattaatcataactttttagactttaattttcagattgaaaggtcaaattccacccggatagtgcacagagtggaaagcacggtgccttgctggacgggctttgtgggaattcgggatgaccatggacagcacactagtagagtcgtataataactaaatattattaatatagtatattgatgttttacacgttcaatttttccatccagattaaaatgccaattgtttaattctttcttttttgctaaaacaattatttacttattagagttgtataataactaagtattattaatatagcataatattattttaaaaaaaattctgttgagtgttaggccctcacgaatgaagttttctaaaaaaaattaaaaaaatttattgttttgatatactaatcaaaaataatttttttaaaataaaaaatactattttaatatatttttaagctaaaaatatttttaaaaacaaataatatttttatatttttatcaacgatggtactgtttttttttcgttttctatggcctccagggttgaacttgaacgtttccaggatcatagagaagtccactcatagtttgaataatcttctacaacggcatgtaataagatatatttttattattatatattccacgcgatatgttcagctggctgctttccaaagccctgtttctttgttagctacgaaaaaaaaatattgatatttagacaaaattaaacaaactagtaatgtccacatgcactgggatttaaataataggtatttgttaggtcattgttttcactacagtgacgtttaatcgcccgcgcgagctgcttaatattgtaatggaattagtagtgtaaatgcgagttatttattaagctgtgctttcaatctaacgatgaagaaaaactcattcaatataagaattttaggtttgaatctcgccactgtattctaaaaattataatatgtatgctcagttaatagccgtaacgttccatctgaagtttttaaaaattttgatttttttattttaaataattttttatgtttttcttttgttattttgatgtgtcgttgttgataatcaactttaaaaaataaaaaaataaaaaatttattttgatatatttacacacaaataatattttaaaaaataattgttattatcatttcaaacacgtagcgtattgtaatttattgggattgaatttttatatcgtgaaggagttcttccggtaaaccagatctgataacgcaacaaatttaaaacctttgcaagtttcttttaacaaattataagattttattgttgttgttgttattggtcatttacaagagaattttatccattaaagtcggccagcatatgtttgcagtcaagcgattgaaactttataataaaacacacacgtgaagtttggcgatggccgcccttcataaatttacaaagacgagagagggatgcagctagcaagcccgtattgaattacaacttgcaatccgagctgtagccacttttagatgccaaaatactggaggcaatcgacgccccctgggaggaattacctccactgttctagctgggttatctaatttcaaagtaattaaaatcaaaatctgtagtcaaaatatatttgcctctgttattaacattaatttcattttcttgtatcaggtaatgaatgaattcgtaacctatcactgcttatccacccacaaatatacacatcacgagctccaaattccagtgtgtttcgaatcctcgttagaaaaagtcaagcgatgccgtaaatactctcgatggtcctgcttatttatttcttactcgatctctcatctcatcgcatgttactagaggaaattaatagcctccatgcacagtttggtacgtcaatgccgatgattgtcaacgccatcgtgggcagtatcatcatggaattctgttgcattctattatatcatttattaaaaaatattattttaatatatttctaaataaaaaatacttttaaaaataataattctttccacacggtgaattaatatttttaattcagagaaatatcgcgtcgattttgccaatccctccattgcagactcggaatgctagagtcgcccggtgaaattaaaagaccaattatcttgactgttaataggaattttattggagaaatttccatgttagtcaaacatctatgtgcggaagaccacgttatgttcatatagatgaactatacgtggagcacagagtcaaaaggattttccatccgttgggaaatagctacgattaacattagaccaggagagaataataaactgggttaattaaatatacttaaaagagggtgaaaaaaatcatcctcgccatacaatcatgcctgtgatcacatgaaagtcacggtcatccattaattccactgtcagtgccaccattgttgccatcaatcggttgcttacataccaatagagaggcctgcgttgatttgcccagattgtttttatttgctatcggggttgatttgttagacgaagcctgcgttgccgagtatatttagagtgactgtggctgttgatgatcatttgcatgaattaatatacagaagttgataaattcgtgagcaattataacttcttttaatcagatccatttattgaactcaatatatctgatatacgccatttaccatgtatgattattttcaggtttttgtatgtatatatattttttatgagctaactattaatagttattctattagaatattagtaggttatttatcttcgttaaaaaaatattcaagcattatcaacgtgattttaaaaataaaaaaaaattatatagagattgatctaatataacttagtcaacttgaaaaaaaaaacataatttaattgaaaaaaactttaaagtgatatcttttaaaaaaaatattaagatttgaatcggcttaagtcaacccatgtgaacatgtaaaatctatgattcgaatcatgagatcgtaataatatcatgaagagcaaattaaaaaaaaaacatattgaaatacaattcttaatcaactcaatgttgaataatgaaattaaaaaaaaaattaattaaaaaataacaaaaaaatctgagtcaactcaagttaacctgtatcatgagaccaaaataacctaataaaaaacaaatcaaaacaaattataaaattcaattctcaatcaatctatgttgaaaaatgtagttgaataaaaaacaattaaaaaaacaaaaaaaacctaagtcaatctagtttaactcaccaaatccttgactcgggtcataacaccatgataacctcatgaaaaacaatcaaaaaataagtatgaagcttaatttcctatcaattcaaataataaatgatgagattgaaaaaaaattatattacaaaaaataaaaataaaaactcgagtcaattgctttaactcacaaaacttataattatattaaaataacattataaaaaataaattgaagtaatgaagatcaatcactaatatctataatattaaaaaaaaattataattcatgaggaagaggactgtaatttcccttcttcaatcatctctaggtgattaaaataatttttcaattttatccatacttcttatgtgtcaagatttccttcgcgcaaacagatgatttgtctccaaaaatcccgcagttgcagcatttgccagattgcggttcggtgaatttataataaagaatcaagcacaactccattgacagcatttgccagattgcgggtcggagaagttaataaagaatcaagcacaactccattgacagcatttgccagattgcgggtcggagaagttaataaagaatcaagcacaactccattgaccgtctttcatagacatgatttggtattttgctctgaaccaattacgagtctaataattatatgcttggataaaggaagggacgagtggtttgatacatggtgtctcgttttctctatctcaacggtcccttcagtatgtatgggaaaaaaagcagatcattttatttttcctttttaaaaacagctgtttccttgatttgacgtggtctctctcctgtcttgaaattaatataattgagggtgattagtagtgttacctgaaaaaaaaaaaacctttctctaatctctacgatgaacacgaagctttcttctgccatgaaacttgatagatgtttttgagccaagcaaattatgctttatatgaagtttttgatcacttggattctattcctgttgtctcagctgtgcgtgcaataactatttgttctgatctagaaatcatgcaactgttaatgagaattacactgcctccattcattcattaattgcaatttctgtgattaacagaacaggctgttataagaggaaaatatggcgaacaaggatgcaatgttggcgaagatggtggtttttctccgaacacatatgatgcttaaccttgtctttgaaaattccgtgacctctccccatctgcaaatcaccctccaaaaataaatctccgaggatatgagtgacaggagaatgaaaatagatgcacagctgatagacaactactgtatcttttctccaggatagctataatctgctgtgtccgcccccttaaagagagctatgtatattcaaaattcatgcgaggttcttgtttaatcatatccattggcagtttccaagaaggcttggatctagttaaagaggccatcaacagaacaaggtacaacgagagaataaagatgaccactgatccatggtgtcgtcgcctagcggtgataaagttagctgagcacgtttttaagttcagaatccattctgggatacttacttttggaccccatttatgattcgatttgcagagcagttctaaatttatttattttcttatttttcatatctttgttaataattttggatctcaagttgattttattttctggtatggcctttgatgaaaaaggacaaactatttatactatttgtacgtaatttttttggccattattattaaaaaaatcagaaatctagtctcgagagttttcttatagttctactctgttttctttttgaagattttaaagtacaaacaaatcccatgttcttcattgtacgcagacacgtcgtaacattgttgaagctcttaacatcatccagattaccatagttagggcatctcaagcaaagatgatattttaaagtgatattttaaataatataaatatattttttattattatatatattttaatagaaaaaagctatttaaaaagctaattgtataaaaattaaaaaaaaaatactttattttttaatgaatttgatgtttaatgtcatctttttttatatggctgcatttaattgggtttttttttttgttggtctttttttttatttttttaaaagacatgtaagaatatattttttgaagagaaaatgcattttctcattttatttattagcactcctttagagcacatgtaagacaattatgaaaaaaccaaattaatatatctttatttttttattttcatttatcacaacccatggaattgctcttactggccacgatagcaatacctacccactctcctttctatgcaaaggatacgtcataattactaatttttacctcatccattgctggggttccaaagctaaaaggtggattaattcttgtgatttgtgttaaaaagaaaaagaaaaatatattgtcgaatactttatcgtggtagtattttgggaccccaaaatttaatgtttctctctcgactatttccaagaagttttgtctttatcttcaaccaattaccacttcgtgcgcgataatggcgacttgtgcaccaacacttttttctaaaaagtttaattttattttctgattatcttttattcataaaaatcaaatttctcatcgaggaaatcttaagcgtgttgttcacactgctgtgtgtgtgtgtgtgtgtgtatcatacaatttctattttttttttgtacagagcaattagacttgtactcttgtgtgtatccaggggcggaaccagggaaggcaagcaggcccgatccctataaaatattttaaattttttttttatttaatattttattatttaaataaataaattttttaataatatatattattatattaattttagccttccctgtaaaataaacctagctacgcccctgtgtgtatcgattgaactttttctttcacactacaatcagaatattaaaacacgcatcaagtcgtccaacagtcattgattctaaaaaaagaaacgaagaaattgtcctgtaatttcgatcgagaattggaaagttcttgctcatgtaccaaatggagtgcaccctccatattttgccggagtggccgaaccagccatccattaatggctaagtgccttgagagagacacgattttcactttatatagcatcagtactcgtgtggataatacgctcttcatttcttactgcccaactcttgttatgtaattctgcgttgcgtgttatagtttctttgacctgaataacagtattcttgtggatttccctagacaaaagcaatagtgattaacaatagggtgttacagtctaattatattttaaaaacatttaaatttttataggttttggatcattttgatgcactgattttaaaaaataattttaaaaaattaaaaaaatatcattttaatatattttaacataaaaaatatttttaaaaacaactattatcaccctcccaatttaaacttaatccagcccgccatttctaggctgcttcaatgtacaccgggccttgattttatcgagctttgaatggtcaagaacaaagggtggagccattgattgaaattagctccgaagacatgcggttcatgaacaagacaggaccgatttaataattttcataactaattcattgtctgataggcattgtagtgtttgtgctttcaagacaaagtgaacctattatgaattatgattgtaaaaataataaaagattcaaggtgaaaacattatttatatgaataataaactatttttttaatatatttttttattggaattttttcgtcgaatccttttactttttatctaacaatcttagtttggttttacagaatatatactcggtaaactatgaagtagtgttttaattgtgaatggtgaactatctcaaactttttaatttattataatttattagtatatataattttggtttattttttaaaaaagcacatgaaaactttttaatttaccattgaagttttattaacagtaaaacagaaaccatagcaaacatttacaccacttttttgcgttgaaaaaaaaaaaaccccaccattgcattaggaataaagaggtgtttgggggtgtagtaatattattttttcaaggtattttttctataaaatatatttttaaatttttaaaaattatttctaatatcaatatattaaaataatttggaaacaaaaaaaattaatttgagacaaggaaaaacaattaatttttttcaaaaatatttttaaaatacagaaagaaataaagctaatatcattgataatatctaagatttttattgaaaccgcgtgtgtgtgtaatagagtaaattatagattagtttctctaattttgaaaaataaattaaatagctcttctagatttagaaactagctcattagtctgtttgttttaaaatatatttgtaaattaatttttcatgcatttcatgttttttatttttttataatttaaaaaacaactagctaatacggaaagattaacgagaaaataagattttatttacaattaagtaacattaaattaagaatcatcaacaccggttaggagtctagttaattaaaactaaattaatatttaattaattcttcaaagctagaagcctagaaaaactagtttatgatattcatttaatttatccctttcaacttaataactactcctatatatatataacacataagtagcacgtgggattaataaattatttattagtatgaacattttaatcatcaaataaaaaaatattgataacatatacttattaaaatatttttagtacgttaaaggctcgcaacagcaccgattcacgataatatttttagtatggctatttatttttagacccgcgcagtgtttatcattacatttttttaaaaaaaatcaggatttgactgcacacgcaaactttgttcactgtggattgaaggtgaaatgacgagtttgccatttaaaaataaaattatttgaagtcaatacaatatttttacattattcattaattattgccagattaatcgagtacatcttaatcttttcatatttttcaagcaatgtaaaatgactatatttctgttgcaagcaaaatatattcagttcgtttgtaagagttttttcatgcttttacttttttaaaagcatgataaaataattaaattattcttgtgaaagtaaaaattttctaactagtgtctacgttttttttttttgttttttttttcacttttgagttttagttatatttgatttaactatgaggtaatttgatatattaataaatataaaatataatttaaaaataaaacaggcttgtgtgtgcgtttaaattatccttacaaacaaaaaatctctaactagtgtccatggtgtttttgtattttcactttaaattttaactatatttaatttaactatgagatactttgatattttaataaatataaaatataattaaaaaaacaggtttgtgcgtgtgctagtaggtgggctacaatcaagcttttcaaaagatacacgaggcatttcataacaaccaaagactaccttccacaacaatattgaaaacatcttaacgactctctattcttaggcatatatacgtggcttaatgatctttgttttagcgctaacaaccttttttttatttattattctctaattttttctttgaattccatgcagagccctcctaattttacagacaacccttcaaattgtttttttttttttttttgtatttggtcccaattattttaattaccatgtgttttatttaaaatgatttagatttagaattattttcaatttcgtcctctattttcttcatattatggtctccatcatttgattgttgtttgtttattttatatatttttaaaaattaatttattttatgttttgatattccattttttatattagttttgattctaattctcttgagtgtttttttaactttaataatttttttaaattgattttatttttgattttatcattcaatattaaattagtcgagaattgagttttttggttgagttcgggtttaggatctcatgggtcacgacatgaaagattaacatggtttaagagatttgtttgagttttgttgtttttttatttttcaagtttttattttttttagttttatcatttaacatttatttaactaaagactgggctccattattattttttatttgttttttacaggttttttcactaattttaaaaaaggtttggttatctcatgtcgagtctttttatttattattttttgttaaatctagcccttttttttataagaaatcttgtttttaattaaattaattaattagatataaacattaaatatctacttcatgatattttatctaatttgctttataaatcattactctaacaatatatacaatatccaatatctctcaatgttattgtgtagatttttgttgtggcatcataattgtttgagctatttttaatgatagggtgatatcgacgacaaagcgataataagtttttatttttttctgtatgatatttactgtttatttttctgttaattttttttaattatattattaaattagaatatcttgaaattatactatttatttaattttgcctgaactttttttttctcttcaatttagaaaaaatctgtaactgtacgtggcgaagcgcgtgcacatccaaataggctccaaactagcacttcccttctcattataagtgtcagcagccccctctactgtgaatcgcttgtggctacaaggaaggaaatcattgaaaaagacgaggaaaaaatgacgttagggagaatagctctggcacgcatcccggcgactaggtgcaaaatacacagtctcttctctgctccacactcgtcttcttccacgaatcgcacctctcctccactatctcgccacgtaaccgctactcatcttcttttacttgcgcataagcatcaatagctttcatccttgtgttgctaattgaatacagcgatcgcgattttgaattatctaaattttgtttaattcatgttttaatcgcttagaaataagtagtattttagtaattactggttcaattgataaataatttgtttcattaatgttcaatgtaagtataatctctgtttgaatgtatttttgttttctggtattgttagttgcgaattcagctaggtttaaaatttgttaatgtttttatggcagatgagcatgaagagtgaaaatctggtttcgaagctaactagttctggtctattaaagacccagggtcttatcgatggaaaatgggttgatgcaaatgatggtgacactattaaggtctgccattattgtgcgtgtgtttgtttgtaattttgctctactgcggctactagttttgggtattgtttctttctttgtcacacaagacatcacatgtatgtgttcttttcatggaatgacaggttctcaatccggccacgggtgaagttgtagctattgtcccatgcatgggccagagcgagacgaataatgctatatcatctgcctatgatgcatttagatgtaagaaacttcacactgaaccaacctaacgttcagtaaaatgtatttatgctagttaaccttctcctactggcgctatcatttcctaagttttgaattttgttagaggaatatggtttattttgcatgcgaggattatctttcagtagtaatagggggaattgctagtagaggattggtcatggaagtgcagttattgctgtgctgtctttgtaggttagaatccatgctttcagaaggtaatggcacttggatgtctcttttacagtatgtcaaccttattactgaattggagagcatatatacgtttttttctgaactcatgtgacaccatcttggttattcctttcaaagagtttggatttcatgacaattgggtgaagtcttattttactacatcaatccactattattcttttcaattgacctgcaactcgcacctgctttatagcccgcaccacgtaactaactgctacaatacattaaatacttcaactcatactcaaacgcttgtggtatttatgataataatcactgtaaacatgcagtggtgcacactcttgaaatattacttccaagcttctatgtgttgcatttttattcctcttatcctagcttttcgcagcacaatttgttggtaatttactgtcctacagatcattattttagctgtctcttcgagagttatgtggtactctagaagcaaagagtgaatggaatggattaaatcgagtaccaatctagtttttatgacttacaagttgatatgcccttcaaagacttacatagacctttgcatagatacaatcttaataggatctactcatctgacttaaaatatggaaatctcttgttttttaccataagcttgctaaactcctcattgtttatatggatttttcttgtttagctgtaatactagcatattttgatggcccttttctgatatagcttgacattgttttttttttttttgatttatatcttttgctttactggacttcaaatgatattgaatttttttttaaaaattcttgctgatggttgcaacatgttcattgtcttttatttggccagcatggagtaaactcactgcttctgagaggagccaacgtatacgaaaatggtatttaacccttccaatacgatcttattaaattatctgtgttgtgaatgtaaatacttccaaattaatcaaatagttgaaaataactgtgttgtattggtagagtattatggttctctacactgaatctcatatgattctttccacctgtattgtaaggtatgacctactaattgctcacaaggaagagctgggacaattaataaccttggagcaagggaaacctctgaaagaggccatgggtgaggtatctcatctcaactttgctttcggaaattaagagataagcgttaaccctacattgtgttactggtcattgtcaagcaacatgtgatccaagtctctaataacaggttagctatggagctagttttattgagttctacgcagaggaggcgaaacgtgtatatggagatataattccagcgactcttggtgatcgtcggttatttgttctaaagcaggtggctataactgtttgtgatatatgaaatcctgtttaattgcaaatacgagtaaattagttcttccgacagcctggctactcctatagacctcgataatttgcccttggtttgggtctctttacaaggccttttcaaattgtgttttaatttctggcaccagcatgtatgtttaatgcaccaatatttgttaaaaccacataaaactcatgatttttaggaattaaaatcctcgggttcaatatctatgagaagaacagggcccgagatcttgggacacattccttgcatgaactgtgttttagtcaactttatcctggtagcggtccagaaatctgtttcttaatgatctatcttgatgaatagttcttgtcacaacttttcttctttgagctgtttgcatggctttgataatttcccagcgttgcttgtttctgtgcaatccatttattcagctatttatccagcaatcttcatgagtttttgcagcctgtaggtgttgttggggcaattacaccctggaactttccattggcaatgattactagaaaggtgtgttcattttagaatgattctgtgcaaagaaagttaaccttttctggtgcatgagtttgttgttgaagaataacatacttttttcctcacttgcataggttggtcctgctcttgcttgtggttgtacagttgttttaaaaccctctgaactcacacctctcacagctttagcagcagctgagttggcccttcaagctggaataccaccagtgagtctcaaactttttacgtgcacagtggaagtttcttaattatttaggccgtgtaagatgcaagtgcttggatataatgtggccttggttgtctttgtaaattgtgtcctgttagacattgatgataaagttgatactttatggttgtttcaatgagaaagacttatcctctgcgatgcaatgaagtttttggagtaagttttggttggaaactaggatacttgtaatgttttattatagtctcagcatccaaaaatattctattatctggttgtgcaagaagaagctgcagcaagctaacatttagaatatttactaaagagtgcttaaaaagtaaggagggatgggaatgtaacataataaaatccaagtatcatcccatgggtattagatgtttatcacaagattccaactaagcaaagtactgaagaaaaatgcccttgctgactgttaaattgagtgactttgtgttgcaggaacacctactgaagaaccacaattgacaaatagagtgaaatgctcttttgtattttatatctcatcatacctgtgttatgattgctaacctatgctaataatcagttgagcatccttaccgagcaatgaaacagaaaatacccatcactggcaatctttttagctccgttctggtttagcatgtccttgcatcaccggacaacagcaggatctggtctatcgtcctgatcaaactgctttctgctttgaatgacataatgatggaatgaatgaagctttttctggtctgcttttgtagatgcatgtcatacacaattgatgtgttatattagctaatatgagttcaaatttgttggaattctgttcatttgtttttaatggttttaatttcaatatttcagggtgttctgaatgtggttatggggaaagctcctgatattggtgatgctttactagcaagtcatgaggttttacacccttcctctatttccttaaaccaaccttctcttctctttgacaacatggcattgtcctggccagagtagttggatattcaaatgacataatgttgatattcttgctttatacatctgattcaggtaagaaaaatcactttcacaggatcaacagctgtgggaaagaagttgatggctggtgctgctggaacagttaaaagggtatgcattggatgcaaaatgaatcaatgtgatgatgtttcagaaatcatcttatggctaattgtcttttcccttaatctttctagttatctctggaacttggcggcaatgcaccctgcatagtatttgatgatgcagacctagatgtggcagttaaaggatcagtaagttagaggggttccctgtgcatgtttattttgattgtggtattgtcatggatatttctgagtgccatttaataatgtttactttacatgtttagacatatcagatggacacactaagcttcctatctgactggaatggattttggtgccgagggttgttaattgttggttagacatgggggtccatgtctccatttttggaagtgaaccttttgtgtgaattgcattggtgaagccatttgatttactgatttcaggacagcctattactgcagaggctttgattcaggattttgaaaatgtgcttttgttttgcattcattattgggaggtattgtcatggtggtggtaatcttatcaaatcatttcatatcattgcagcttgcagcgaagttccgtaatagtggacaaacatgtgtttgtgcaaacagaataattgtgcaagagggtatccaactacagaattacagccctgattttaccccttaattctaattttatatgtaatatgcagccattttgatttgtgatatattgcacctttatgtgcaggtatctacgacaaatttgcagattctttttcaaaagctgttcagagtatgcaagttggggatggctttagcgaaggtgtgacgcaggtaggggttgcatttttttttttaaaatatttcgtaattgttcccttgttgaataataatttgtgcaaagctagtcaggtattctatgtttcctagatttagcagtttctagggatgatagcatttcaatggttggtgacacatgctagactgctttatcatctttattgctccctatctcgttgagtttgtccaccttttcattttgagttgtcctaaaattattgccgactatgaaaagtcaaaattattaaccatttggtcttcttgctatatccttaattttactcattttattttatttttaattcaactactttctccctcgtaaaactagatttaaataaaactctttatttcttgagtttttcaaacacaattcttattaattgagggagtaaatatatcaatgaatttacaatgaaaaattgtcttaattgtactatttatttagattataatatgtgatttagcaagaaaataatgcccacacatgctaaaaaagttgtgattaatatacttaaaaaaattgttctttctttgtagtttcaaaccttgatcaactactttgcacattaaacctctcaccactagcccaaccaccttgatatgattggttctggaatataataaaagggtaatactagaaagtgatgaaggaatggataaacatgtcatcccattaattgttccttcttaatctttgtgaaagtcgaagggtactagactttgggtaatagggagtctgtaatttgtttggatgaagatattctaatcacacattcatgcagagatgtagtttgttgtgtttatacatctagaaccttttattagctactttcatgagatttgaagtgaacagatcatggtgataactattagtttcctcacagggtccattaattaatgaagctgcagtccagaaggttagttgcattttatacatacaattggccagccatcttgcttgtgataatcctttttaattaatgagatttgttgtcaattggtccctttgtgatttgggtttcaggttgaatcatttgttcaagatgccatctttaaggtttgccttttctgctttatcttattcaatgtactaggttgaataaaacttcatgcattatattgtctttacatcttccaatatttcctcttcctccccgcaatacactcgacctatgatagcattatatttttatgaccaagggagaaaacttttggaggttggagtaaacttttgtatgttttggtgaaacctagaagtatttgtaatattttcaacgccaaaaaattctataatgcaattaggttacttcgacattctgtttctttgttccctcgcacttcattatatgaaaagctgaagccaaataatagacttggttacagtaattaagtttcactggcataattgttcttcaattatttgttctgtatatatctcatttctaattaaccaaaattgtacttgaagggagcaaaagtcctccttgggggaaaaaggcatagccttggaatgaatttctatgaaccaaccataattagcaatgtcactgaagcaatgcttctatcgaggtaaatacatgaagataatttattcattctgcaattctcagctgtataattaaagatgtccatcagctttcttacaacaggtaaaaggatagtggctgttgttctctgccacttgctgatgggtatacattcttaccttcagtgcggctggttgaaacatgcagccatgctaaaaactaacaggccaacctttaggttttggcatctaatcatggacactcatggtggttttgttttttagctctttcttaaccatggcatgtaaaattcaattgcaaacttaaggttaatgttcttagacaaaccaaaattgaggtcttgtttattgatcggggactaatccaggttcgcagtagatgacaaaattgaaggctccttaggaaatgttgcatccacaaatactgccttttaatcaaatgaagttgaaggactggccattgctttcagttcttttatgtgattttggagttggtacttcataattaacttgctgcaaattcattttcaaattatagaactttcttattaatcagagcttagctcgaagagttaatggatatgtgtaggtttataatggagcacggtgtggtttgcattttcatttttgctctttgaagtattttggtttgcacattgttgatatcagtagcgttagcttttggtttgttaaatgcggcatcattgatttgtttacattaacataattttaatccatgtcattgaagttccttaacattacctataggtttatactcattcaggatgttaatatgctctcctctgccttgtttcagggaggaagtatttggcccagtggcacctctgttgcggttcaaaactgaggaagaagccatcttgatggctaataacacaaaagcaggttctttcgtctgcctttacatgcatacatgtacacgtatttatctttttgtttcctcattgctatcattttaaatatcaattatctgagagtattacagatgaaagtttgtaatatactccttaacccagtttcattttccatactattgtctttatctattgtcatggtaaacagacttatggtcaactgtaatacaggattctagcttatcttttctggtaaacgatgcagggttagctgcatatattttcacaaacaatgttcaacgttcatggcgtgtcactgaagctcttgagtatggacttgttggtgtcaatgaaggacttatttcaacagaggtgggacttatcctgtgttccccattggaaaccatagattggcttcttaaaacttaaaaaatgtctgttgctaaacaggtagctccatttggaggagttaaacaatctggtcttggacgggaaggctccaagtatggaatggatgaatatctggaggtaaagattacttttaatgcatcttaggaaaaagtgaaagctatcttctctccctctcgctcccatgtttaagaacacaaattgggtattctaatcttctagcttgcttttaggactgcattgtttatcaacttaatcacacacatacagatctacatttctttattctttctatttgagggttttcaacctgtatttatgtgtgagggagatgatttactaattaccctggttttcaattccctaaggatcaagttcttggtttattttgcacctcttttagacctttactatcatcataacgaggtattcttgcatgccgtgcagatgaaatatgtctgcttaggcgatatgaacagaaaatgaggttcaaggtttgtatatatcatcaattgcctgttatatttggaatctggttgctcccattaaacttaaattttcagataaaatgcttgttgttcggtttattcaggcaattaaagcggctcataatctgaaggtagctggattttggggagagtgtgcagtctcgactttctgaatcttaagcgtagaagatgaccagcaaacagggcatcacaacatgtgtacgtaaataaatgcaagtttgcaccatttcccagataaattaataacgtatcttgctgctgtctgttctaattctaaaccctttcatcgagatagttttctttttccttgcttctgggtaatacttgtgatcctttttatgcgcaaatggttaattgccttctcttttcttctgttagtgttttctttgttagtataattaatgagaagaaagccttagcacaccggcctagcaatcttgcttctctatttgcactggagaaaggaagatacaaggcaggcagatgtgaaaatctgccatgtcttccttgtgtatctggtgtaaatattactgatataatcatacgttggaaattacgaggcaacaactcctttgtatgagtatatgctgctgtcgtttctaatataaagataaattaatgttttttctatctaaaaaaaaaaaggaccgcctatttattgtttttttttagctattgaactaaggtttcaatttcgtccaagaaaattaagatttcatttttattaataaaactaaaaaaattaatacaaacaattcaaactttccagttcctaaacttttgtttttttttttcattttgtacacaaaagtcatctcaattaatcaagaaataataggattgatctgtcttcaaattgaaaatgcatgtgccaagattactaggtggtgtttgagaatctgcgctttagaaagtgcttttgatgttaaagtaaaataaagggcatcatcatcaaattctaatatcaatagaaccaaaagaaaattacttaattttgaggggaagcgatttttttcaaattatattaggaagtacaatcgaaataaaaaaaaaaagcccgtttcgaagctttattcgttacaatattgtctgagcagctttagaaatgattattgttatattttttaaaacactgctaaccacgtagaaaacatagtcgcccagtccgcatcatcttcacttaaaaatcataaaaccctccttaattattcccctctctaattataatccatctaataatgctacagtactgtatagttatacaaaatccaatagtggaaatgttattatctaggctagctataggaatattttagctttagcacatcgtaaagtaaaaggtaaaatcgagtatcaaaatgagagaaaggcggggaaatctaagttgtgtagacggtctgatatcttgtattccaaacaaaaggtgtttcgccaatggaatgtcatatattccatattttatgtagctttgcaagatcctcttctgccaacttacttaccggtcctttatcttctatatatttttagataaatccttttatcttcttcatcatcgctgtatatatatagctgaacctctgagcacatttcaagagaacaggtctatttattaatatttagcagttgatttcttgttcgcaggatgcaacggagcagtctcatacttgttcatagtatccacctgttcttgatgaaatggagagactcattctggagattttatggagagtttagaattattttttttggtgaattcgattcatgagtttacaaatcatttgtggaccatttttcttaattattattttagtcatagagaatgaaacatcccatcaattcactagggcgagcaggatagaaaagacactattctaaagtattataagcgtacataaagatgggtccctcaaattcaccttcaaaggaatatattcattttagagaatatattcatcttaaagatgcttgaaattcaagctagcatgcccttaaaatcaagccaaccattttcccactggattagaggcttcaaatataatgaactaaaagttagaccttagctttgcttggttatattataaaggcacaaatagtgagctaatgtgttagtccaaaaagctaggaatcttcaaatctaaatgaaatgtcatcttccacatatggatagatcagagccaaaatacaaagcaatttcatggtaattaattaattaattattgccaagtgtggtggggggctggccattatatatggccatatataccacctgcacttcaatggtgacccaaaccagcttgttttccacttggtttacatgcataattggcttgctttggacggttaacatataattaactcgtatggcttccagaaagaaaaaaagaaaaagaaaaaaacatttgagattttaactcttcatggatatgaacttgaagaaacgtactcttcatagaaacacaagtctttgagcgtgagattgtttttttggtgggagaggatcgaatcttcctttgattgtcaaagacgaaagcatttattcccatttgttagatttcagttgatagcttccatttcccttttttagatctctcaagacttgctttccatacgagggaacgcgctaatttgctttgttttaaaatactgagtgattgactttgccacgagttggatcgacgtttcaaatttctggagtctaattgcttaattaattgttactaaacccagttaacaacaacaaatctagtatatttggttttgaatatgtttgaacatggactcctcccttttgttgatgatcatctcaattatttacgagtgatgaaatcttcaattcatatcgagagatgagatctgtgagtgtgaaagtttttcttttccttttcaaaacgaacacggaaacaagataagaaaatgctaccaagctttgtgccaattccaaacccgatgtacacacacacacacacactgtttttggcatttcatcaaataaattttttgaatgattgatgattttttaaaataaatttaattaatattaaatttgtcattgtttttttaatatttaagtgtgtcaggacttaaagttcaatattcatagacttaatatttagttttactatgtattaattcttatatgttatattatatttataaaaatacatatttaaattaactgagaaatctgttccaaatctagtaggaaaaaaaaactttttttttcccagctttcccctggaaattttaaaatgctcaatagggtaaaaacacattcgtacatatcaagattaataaaaatatatttgtatattctcccacttatttctctcttcttcttcttatatttatttatttattattaagtaaatattaacaattaattataaccgaataccacaaatattttccttttcccacccctaatctgatttaattactatacttctttaccatgcgcgcgtggggcccagtgtcaatttgttggctttgaccctattagggttcttttgtttgttatggcttggatgaaatgcatgccaggacaatctttaattccagaagatgagcccagcagcaaagctttagaggaagagaggtccccaaatcctgtcatcaaaagctccatactcgaaaccctagctttatgcattgatgttcacgtcctcggtaccagccacaggagagctcctaaaaggtggttcaaccttgtctatttgttcggtgcttttctcatctctaataaaaactacatttatcccccactatgtttaaatccaagatgcattgttgaatctcgtttggtatcattgcatgccttttttttgttaaaattttgaaaataaaaaaataatggtaaagaactaacactacttggacaaaaaaaaaaaaagaaggtaaaacttagcatggctgatgaaaaatcttgaaaacactagttttttaaaaattgaaaataaaaacgaagaacaaaaaataatttgttttcaaaaaggcaacaatacctaagtttttttttttgaaaaaagataccatagtttttaaagttagaggacttgcttaaataaggatgataatttaatctgaaccagataaataccgacccgatccaaatgagtgaatattttctggatagttaccttacctgatatgtaatgagtagggtataatattatattgtcaaacttgacccgaaatcagccctaacttaatctgaaatatatatttatattatatagatatatttgtagaacaactagatttttttaaatacaatatgatatatacatatctcaacttgatataaaacatacatatatgtataatatttattattttttcatttaacatacacacactttaaatatatatattaactattttattttttattgaataataaacaatattcagataattaatattcttatgaatacccaaaactcgataaataacttataaatatttaatttttttatctaataaataataagtaaagaatagatatcaagaaattctacttgcaaatatccattgccacaactgcctttaaatatgtttttgtttttgtacaagtataattataatgtaactccaatactgaaagcaaatctacaatgatacaaaaatcttctccacagatcatataaaacttaatcaccacatggagtgatgttcttaagagctaattaattgtgttgatctaaaagagtttaaagtaaattaaggatatcgcgggcttaactattttaaaaaataaacaagagttatttttcatgcggggcacgtcgttcctaatctttatcagttattcactgtacgtacttaagaccagaaaaagtactaagaactggatacagtagtactgataattgcatggagacacgtgtgaagatttcgtcatcatcgacgatggtcgtacttctatagatcaaagatattccaacaattatcgtggagggatcggctggcttgttgaggattttgcttcctttttttagcatttagaattcaaatctatcaaaattttcacgaggatgtatgcatagatattgtaaaatagaatttaatttcaatatatgcaaattaattgatataaaaatatatatattttaaaagaaaagaaaagaaaaaaactctgaatgaacaatgataccccacggtattgtgaaagtactctatgtgcacaaaagaggtttagaaaagaaatgtcaagataattattattacaaacatatcaatcagttcttttagtaggccaaagagatctagatcacttcttgcaaagaaagtctaaataaattcagaatctaacaggaggataatattaatggttaattaatatatatatcctccacctaaaatttcaagtcaatctctagctatataattattacaatctctaagtgacaaatggacatgaattagatctatttgagtgtttaagagtacttttacttctgtttttaaaagtgtttttagcttaaaaaaatattaaattaatttttttaatgttttctaatggttttaatgtactaatattaaaaattaaaaaaaaattattttaatatattttcaaatgaaaaataccttaacttacctcataatccaaaacacacactaatcaagactacacaggacattaattatttgtaaactggaatatttctaaagttttaataaagctaattttttgaataaactatatcctgttccgacttaattatagctgaagtctctgactagacctgggtatcaaagacacaatatattccttgggggcttaaaacaatttttgtaataaaattaataacaattggatatatatatatatatatatatataattatgacaagaaaaggagaagattttcaatatatataagagttagataactatataatccgaaatgacaatcattattgtgccaatatatatatatataatcaacaagccaagatagagagtgtcttaatcatttaaggtatcattgaaacctttttgttggcaatgacatgaactaaagcctgtctttgcgctcaaaaccatcttggcaattatgatcttattggttcataataagctaaaaagtggattgtactacgaaacaggagaaatgatgtcaagtgaccatccatgcacataatgtctggtggtaagatatatctaggtttatatgcgcgcagagcatggctcttcccccctccaaaaaaaaaaaaaaaaaaaggaaaaaaaaatagaggtaaagtacaaaacatatcgtggtcatcatgattgcaagagggcctccatttctcatatcttaataccaaaaaaagcttcacatggtagaagaataacactacaaaaaagatgtattcttcttttggtgatataaaaggtattctactctcctctctgacaatattacaggtacatctatacagccccaaaacataaagattctcacgcgctctatctctatgaattctaatatctttttagaaatgggtaatttggcaatggtgtttcaatttagggtagattgctacagttaaggaagagagatagagagagggtatcttttgacaaaggttgtagggctgcacattagggatagatactttattttattttattttattggtattactatacgttttcttttatgcaaggttaacttgtccccccccccaccttgctttctactagtgtgtgtgagagggagagaaacaaatcccaccctctcttcttcttcaaaaacgcaccctattcttccctatttgcatcgcatttgttcttgaatctctttgtattcccagagtctcttagagagagagagaaagagagagagaatgttccataccaagaaaccctcaactatgaattcccatgatagacccatgtgtgttcaaggggactctggtcttgtcctcaccacagaccccaagccccgtctccgctggactgttgagctccatgaacgctttgtggatgccgttactcagcttggaggcccagatagtacttaatctctctttgactagctagtctttagttctatttttatgtacgttcctaatttgtttgtgctgataacttcttcaatctctctaatacgtgttctattgccccccctctctatgcttgatcaaaaaatttgcagaggccactcccaaaaccatcatgagagtcatgggtgtgaagggtcttaccctttaccacctcaaaagccatcttcaggtttgaatagaacattctttcatgcctcttttgcttttgtattgacacctttgcggcattttcgatgtagggttggcttgatttcattcattcttttccttctatctttaattttcatttctttaacgtttcttttctcttaatttagaaattcagacttggaaagcaaccacacaaggatttcaatgatcattcaattaaggatggtaagagagctaattaagccatctttatatacagggtttttatttttatttttatttttatcctttcggttgttaaaggtggcaaggaaagactcggattcgactcctttccttccttttgctttacacagagagtgctaaaattaatctaaatgcttacctgttcttttttaattttccttgctttgattcttatacatgcacaatgtgatcaaaatgatcagattaattttttcataattttccatggcaagcagcttcggcgttagatcttcaacgaagtgcagcatcttcatctggcatgatgagccgcagtatgaatgagtaagtattacattcaaaaatacctctctcttaaaccaaacaattacgaacaagcagagttcatgcaattttcattttcttctaaggataacaataacgatataaacaaaatcgcttaagtttctttctttcatttctgtggaatatatgtgtgaaactgtacatagcagtaactcacacatgattgatgcgattaggatgcaaatggaggtgcagagaagactgcatgaacaattagaggtaagcacagatcgattgttcctcaacatctactccaccccttttttttatatataaactatttccttaataaagacagtccgtgtagactttatttgatgcatataaattaattccaggttcaaagacaccttcaattaaggaccgaggctcaagggaaatatatacaaagtttgttggagaaagcttgccaaaccctagcaggtgatcaaaacttggcttctggaagctataagggaatggggaatcaaggaattcctggtatgggtgcaatgaaagaatttggcacgctgaattttccagcatttcaagaccttaacatttatgggggtgaccaacttgaccttcaacacaatatggataggccatcactcgatggtttcatgccgaacaacgacaacatttgtttgggaaagaagaggcctagtccttacgatggtagtggaaagagccctttgatttggccggacgatctgcgtttgcaggatttgggatcaggaccggcatgtcttgaaccccaagatgatcctttcaaaggtgatcaaatccagatggcaccaccatcaatggataggggtactgatctggattccatatctgacatgtatgaaataaagccagcgcttcagggtgatgcactggatgagaagaaatttgaagcatcagcaaagctaaaaaggccatccccaagaagatcaccactagcagccgaaaggatgagccctatgatcaatactggcgccatgccacaaggcagaaactcaccatttggttgaagctgacctatgacttgtgtagatgtaagtgacatgatataaattattaagcttctttataagtatgagatgtagggtttttggacttgaaagttactagcaatttattaaattagggttctgctctgggcataacataacgccatgcgtggcaaacaatccagttaaattgttatgaattaacaagtacattaaacttgtacttattttggcacttggcttcttcttgcttccctcgtgcatcttatatttcatggcttggaatacggtagcatattaattaacacttaatttaataaataaatttcgtggcaactcctctactactattaatattatttgcttgtaattaactcccatcccgtacgtttggtgtcgagacaacaaggagtcttcaagctatatatatatatatatatatatatatatatatatatatatatatatatatatatatatatatatatatatatatataacttaatctccttcattttatctctttattgaaattgacaagtacagatacaccacagcccttctagtttgtgcatagaattacatacaaaggcaaatgctacggattcttgtcatcgccttgctcctttctttattccatgcatgaaattaagttcataccagcttagcggattaagttcatggtgttaacatttcatgatatcttcaaatgtcattcgaaaacagattggtatcatcattaaagtatgtgactgggttcagtttcgaaccatgatagggatatctaatgcaaatttaaggacagaaagaaagaagatatttcatcgtgtccttgaagacccattgaatcttctactgaacaaaaaatataaaaaacaaatgccactgtctttgccattatccctgcaaaaaaaaaaaaaaaaagccaccggctttaatttttcagtcaaggcccgagcttgaggaatacaggcatgagttctagatcgacaatttgcgcacttgaccttcctcgacgtggtcgaagaaaacaaactgaaaagacaagaaaagaaaattatgcagagtactcctcttacatgcatgcaagttatttatcaataccatcactaattatggcccctatttatgtgagaacctgggattttttctggaaacaatgaataattaatccaaagaaagagcaacatcttccattttcttttatgagcgaaaagggaaatcaagcaacgcctttattaaccagctgcaagaccagaccgggctaataccctctcgaacaataagaaacggcaatcaatttagatatatatatatatatatatatatatatatatatatatatagggaaaaaaaagaaaaaatccctaaatttgaattaagtatatgcaatatttatgtaaagctaaaaccacatgaaaaaacatgtatcatggaggagtgaaacatgtgtatccagaacctcaatgcattatgatacagcttattttatgaaacaggaaaattcaaaatttgttctgatgggggcttttacaatctcatagccctgtacttgtacaatgtcatgtttggtcctcgtgggtcaatggtcaagccatcatgcctgttacgtactaatccagaaatctttttctaaccgttgcttttaagttagttgctctcagttagttagtcctatcattgcagacaaagccattggggaaatgaacataagaaaaaaaaatccactatatccctgtcaaaaaaaaacattctagggttttgggaagcacacatgcagcagtaaaataatacatttgatctgagtgaagggagagattacatatatggaaagcttttttaatgaagaataatattttacccttgagagaacccgacagggggtatatctagctaattcatgctcctttaattaattactactgtgttccaagggcatcaaaaggaagaggacaaattactaactagagggtaatctcatcattattttggtatgcatgcatcagcatgacgtgaagaaaaaacacacatatccctttcaccatattcttaactaagattttgcctcccctgatattgaaccctttttagaaccatcatatgatcattatatacatcgacaatgtatgcaattttattaattagttgatcttatggtgcatacttttgactgataaattctctaccaatactgaaccagaactcagattttcatcccagttccatatttgcctatattcgcgcacacacacacacatatatataggcaaactaaatagtaaccaaataaaaatatcaccctttagttatatatcactaggttggtgatgtagcaaagatgagaaatatgcagaggtttctttctctttgttgatgacaaaaaagatgtggtgccactacctttatcggttgcagagaaattgtcaggaaagctccttctctccacacagacacaaagagaaagaagaaaagctaataaagcctaaaggagaggaggaatacaacgcactttcatgagtgcacatatcgaggaagcttctacctttatgtgtacagagttgagggtcttccttgcctcaaaacctgctgcatgggtacgttttatattacatttacactaatttacatgcataatgtgagcattatgctttatgtggtaatgatcatataataagattatgaatctgccaagaaagaaaataatgatagggtgattgaggcacgatgttcgaagcaaattaaataattgtttgcatcctaattaaggcaccttggattctgtttagcttcctcattcgatacgtttgggttcttgctttgagtgtttactagcaaagtactggctagaagcttcttttgtcccatgtctctcatgcttttagctaggcatgtagaaaatttgttcgtggggattgagttagttaaggataaaaataaggttggatatgtggtggtcacgctaaggacattgactggtgtataccgtttactgtgataattatcgaaaaatacacccgatgtagatttttgtgtgctcagtttcactaatcattgccaaaataatgaaaataacattcgttatgacctttttttacaaaaattacactcatgatcttcacttagatgttttcaaattattatcaccctaatttatcctttttttttacaaagaaaaaaaaatgcccatgtacatcatttgaaccacgaacatctcttactgtttatttcttagaaaacactataagatttgtgtttcacaaaaaagataggtaaaacaaaaacaaatatttttggttgaagaaacgaaacggatacataaaaataaagctctgtctagctatgacggttttaaagttaaataataatgtctttttaaaataaaaaaataaactaataacatgtctatcatgtctcaactgtacatgactcttttgttaaccaaatattaactaaagtaatacaaaataaactggaatttaaatatctatagacaatgacaaggggacaatttgttcagatgggcacataaaaacaaggatggttcatgtgattttataaataaaaggaatgatttgtatatataattgtaagctaattataagacacatcaagaatggtaattgataatgtctccgttagtttaacttttcacatgaaatgatcatgaaatatcacttatatatccaacgggataataaatatttatgaaatcaactacttaacttccatgggaacatggatttaagagacttttaagaatattaagataagtcctcatgtttagagaaaaaaaataaaaccttacatgcaagcatttatacatattaaaattaaaaaaaaaaactaagattaatcagtgtttcattatggattccatcacaattcattgtggacttgctcaaatgaattaatgaatttatccttcttaaacaaagcaaaataacatgatttgaggagtaatatgatctttttcattggatacatttgttattataagattgaataggggcatatcggtatttttctttctttttgcactgtgtaatgactcaaataccctcaaaagcataatttaattaacttttatgtaggtatattttttagttttcaatttcaaaaggacaataaaaaatctaaaatacccttctaggaaaaaaatcatgtagttgttgtttagtggcttttttgtcttttcgaatgagggttaatttggtcttttaataaatacaaaaaaaaaaaacaattggcaggtgcaggctcctatgataactaaacataggctttcatggaagcgttagaaatgacccactaaggtctttctagtgggtagacgtgtggcagtggagactgccggtatggctctgatgggcttttttctagtcctttttatatagggttatcatgggtcatgagttagtcaatttaaccaggtttaactttttgtttcaatgttttttctattgatttaactttggtcttctttttcaggctttttttttaaatagttttttttatcccgatctcatatcgcaggtcgcaagtttatcaaattaactcatttttttttacttttcttttcttgaaattgattttttttttccatttttatcatttaacgataggttattaggccttgaattgtgatttttttcttttttctttctgttgggctatcccaagtcacaagttagtcatcttaggctgactcaattttttttcaatggctttttatttaactttgatcttttttaaaagtaatattttttatctagaatcatattgtgggtggtgagtttgttaaattaactagaattgactcaaatcatcattcattgcccaaacatttttttttatattatataaaatttaacccaatctgcgatgcaaggcaggcaaaccttctagtaagaataataaaggatgagggttgaagcactcaagagacagtactttagcaggaaatagttgaattttccatggagagatatcagattcaaaccatggaaaaaatgggttggcgattaagatgaaggcttgggaaaaaaaaggggcatatacgcgcacacaaacttcctgtattcgattatgaatttatcattgataataaaaagtcaattgtttgcctttgaaaaaataaaaagagggcacgggacattcaatatgcttggcccaaaataagaatgaaaacctttcggagacactctaaactcgcctgggccttaccacaccgaaatgctcttagtggagctgttttcgttgaacgagctaaagcttatgaaatagaatttctgtttcaaaatacacgacgtcctatcgagctgcctgatgccccctatgcttaaagttttaaaaatcctaggtgctactttgtaacaagcaggacagtcgacggcagaattttatgaaccaccgcaacaacttgtgtcaaagtgaaactaatattcagcacatattggattccacatatcatcaaatcaccacagttacatggaaaaaaaactcatattcaaggttgtcaaaaacgtttttttaacacgacacggaatatataatataaattcgaatcgtaaattcaaatcgtaaaattataaaatcaaaaagtaaaatattttaactaattatatattgacaattacagttaagtagtatataataatataacacaattaaaataaaagtgaaataaagcgaactatagcactttcatcaggaaaaaaagacacgggattggatatatccaactgaaatcaagctatccatgcaaagagttaaaaaaaaaaaattaccaacaaatagaaacatagatcaatagaaaagtctactgtacaaagaaaataccagtttttgctcatcagctcaaatgaccttcttagtttcttcatttaaatacatgttggcaacagagtgttagaagataaatgggtgaggggtattagtatatgctgatttcctatcttaacttcttatacagcatacacttagttggataccttatgcaagtcacaaacactagttcgacaagttccataatcagcaatgaagaacatgaattaagcattctactgaatcccacaagaggggcaaattgtaacgaacaagctacacaaaaagagatcacctaaaatgagcatgaaaggtaagaattcttgatggatgcaaatttgtgaaaaatctaattgatggccctatacatattagcagattgcagtttattattcagttaggtcagaacctaaaacaaagaaatatatcaataggcattctacagtcacacatttcacctctaagagaatatatcatgctctttctttgctcacaaaacaaatttgacattccatttaccattcatgccagcattgagggttcaattatttttcctaatttgcagataaggcacctgaataggaaaaataaataaaaagtggaaaaaggaagacaactcaagtcgaaagcagttgcttttgactatgtataacacaatgcacatgctttcagatgttttaaccataaagttatgggaaatgtaccttggtaatcacttcatacccaattctaaatctaacatcttattctctatggaaattatagatgctccaagatacttccgcagctgcttttaaattcctctgtcatggtaagggaaggaagatattagttgcatatggtagctaggacaacagcttacaatttacttcttgtatctagctccccgtgaacctaaacaaaaacaaaaattaaaaattaaagccctaaatttgcattttaaagaattcccataaataatatcaagaaatcaatctcagttacctgcaagtgggtgctggaatcaatggcaaacctcttattggcatgaattttgagggctttggaatctactccatatcttagagatgtctccattgttgtatctctaataatctaaaaaacccaccgaaagccaagtaaattgcaagaacctggttctggtggttgcgcctccgtcgcagtggtgaagacttgagtgtagagagaaaaaaatgggtgttttgagagaaagaaagagagtggaaggcgttgccggtggatttgaggaaagggggatttttgtgagacaaacgggatggagaggactgagattctgagaagagtgaatagattttgttaattttttcgaactcggaaaactcggaccgagtttaccgagtttgactgattttaaccgagtttgactgagactatatctctgagttgactcgtaaaatcaggcgattttactagtcaactcgcgagtttgacaaccatgctcatattgcttcccatagactccgatatgtaggctaaggcgtagcacctcctacgaggtgggcctgtgagttatcagatctctgttcttgggaactaggatatgtttttctcagcttaaagttataggggtgttgaattatacgtgttaaatatatgatttaagaattttcttcgagttatgctgaaaaataattggactagacctccccccattaatttccatgggttaatgtcgggacaattcaccgtttaagcttaaacgccttctcttatcagaatcattttaatgcttcgtatttatggtggatgcataaagtttcttatgagttcatgtatcacatttctttcttggatttaataatctaacattctacctaaatgaaatcgaaataacagtatttataaaataaataagaatatataaaactttttatataaaaaaagtgttttcccttcgaatccaagcgaagcaattaatctcaaaaaagaaaagaaaagaaactccatgacagggtttaaggcccaaaacaggctgagacaattacaatatggtttgttgcttgattactaggtcacagcgcattaagcccataattacaaatggcctactacaaattatttctaaggttaataagtccagcttagagttttctctgtgtcctcgatcaggctcttcccagcccgtgctttatccccttcaaagttcgatgcaaatcccagttcatgagttttctttcagaagagacattataaatgacaaacactcgccaatgtcagtaagattcgttctccgattttccatttctcagtagcaactcaaaagtagacttgggaagattataacaagcttgaatacaacttttcacctagctatattatagatttaacgcctgtgaatacctaataaacttaacatcttattccatcccaagcttgaattggtcattttgttcttcgtggcttggaaaccggttacatactacacttgaagattaaatacaccacaaaccccaccagtattgcaattagatcaaaaacatagttatagttaatgccagttaatcatggagaagcatcatagatatcagcaggagggatgaaataatccatggaaagccctggcacattgaacacgacatcatcgatcctccatacttcttccattctagtcctactgtgttgcactgacacttcctcgaatcgaaaaactgtagcaattgaccttccttgatgagcaattaacacaccatccacatctctatagtcgccaatactacttcctatagtagtctcccaatagatagtttcattttctggagtttgtacccttgttagatgggagtcctccaaatacattaagaggccacttttttggcaaaaatagccatacagtacatgcctaagcacctcagctggcccttcacttctttccattacagcttctcgatcagcagctacttttaaaacgaagcaatcatcctcgccaattcttttctcccctaagcattgtgctttagcaaataagctggctgtactctttggatccaggccctggaataccaccacatgattaattaagtgcacgaagaaaaggtctaagttttaggtgatattagtgttcgagcacataattagatgcaggacagggtactaataacttgtaatttaagaggtttcaggtttgagcttatatatatatatatatatatatatatatatatatatatatatatatatatataaaactaaggaagcatgacaagacacctgaaatcaaatgaaagaaccacaaattaaattcataaatttcaaagaattcaatgaaatactgttagacactgatccctatcttttcgtctgagaatggaggatagctgatctaagtctcgaattattaattagtaaaagaacaaggatatgatgacgagggaggtccaaatattttggtacttccacacatattctagctcagctttgacatcctaataatttcaataatacacgaaaataaaggaagtagaatcatatgctttttattcaaggtgcacaaaatctcaacagctgcaggccagtgattcctctcatgtcatggcaagcaaaggaaacatatacaaaatggggatgccactcctgaaaaaaaaaaaagaaacctaagcataaatgttcctccacaagttatgactaattccctggttttttgtgggaaacggggcttggcccaaaaactccaaaggaatgttcatccctccgtcacttgactcacttggggctagaggcaaaggaaggagccccggacgaggtactgggatttcaattttcaagtatgccacgatagtttctaactttgaaactcgccataatttcgaaagcgaaaaaaaaaaacagaaaattggagaaaggagagaaggaaaacgattgacatgggaacgagaagaaaataaacaaagaagaggggggggaaggcaagaaaagcaaggggcgataatgcaataaatcaggtgttattcactaaagtgcaaaaaaggaaaagtaaagtgcaaaggatgattacaagctgcagtcccaaaaatatactttgaacatgatcaaagatgacgtcaaaaacaaaatcacgtgccattcctaactctgaataacgtgagagttcaaaaaaagaagctagtctgtctggtaaagctcaagacagtttccctatcatgtcagctagttgtacatagatcctaccatttctcgggattgtgatctatacatatagataggtcttcaaattctatttttttaaaaagaaaaaaacttgtattggtcttccatccccatccttatgtctggtatgtaaattcgattaaagtagattaaaagtaaattgtagagtaaaaagcaatgttcctaattttgtcttatcgtcttcaacctagagaaaaacagaaatattcctcagttcaccctgttgtttcttctccctcatagcccgatattgcactaccagttttagatcactagttttctggctaatgtttctttatgattaactaaaactatggtcttcaatttttaagggggcaatttcatcaagattaatattgaatttgatgcactatatatatagtttgtacctggattatgcgacgtagagggcgttggggtcccttggcagcatgagtgccaagccaaggagtgtgacgccacacggtcttcccatcgctgcctgctatgaccttattttccccaacaaccaattcaagagaccacatccccggcaacatttgccaaagaacaaagcacccattttcgccacttctagtccccaagctcttcacgttttttcccgaggaaatttctgtctcgcaacgaatcatcttcacactccctgttgaatacatgtttttcatacatttttgttgctttaaacaccctgttgctgccaaatattgttggatgatataatgcgcggcagaattttcctatagaaaaaattgataagatggagttgccgaattaagaaaataaacatatggataagtagtgtagaagaacttacaataggagtgtttttaatgtgaatgcgatgaatggggtcgttaactagagggattggagctagagggcagcccaaaactccaagtaaaagccttaaatcttgtcctttgactggaatactcccatgtaacgatactgaaaaactgttacctgctggaagacccttttgcaatcgaaaccattcacgaattacttcccatgagctttcctttttgttaccttcttcttgcatgtcggggtcaggaccttctagcagcggagttaaggtttgtgtgctccatctttgcttccttcttgctcttgagcccatggttgcgaggagattaatgttatgaaatagaaagtgaaagttgttgaagatgaagaatggggtttaaagtaaaagtgaacagaagttgtatataaaagcgtttattacggttgtgagtatagctaagaatgagaaggaagagacaaaaagggacagcttatctgtccaacggcagatgatggtaattattataatacagacttgcatgttgggatgtctttcgctttattctttttttttttcttttagactcctcttgtcgtttaacttctgcagggattctcttgagaaactccaggtgagaggagccggatggattaggggctgtctctttctatatttaggagataaatttagctctctctttctttctaatgtctctgtggaccctttgatcataccctacatttttttatctcctaattaccctggtcttcaggggtaatcttccttaaaatcactgcgtaataagagcagtgaagtcttcatgattggcccacagcaacatcgatacttcatttcattcatttctccagtgtttattcatctgctacacacatttcctgggagttttctggtatggctgtagccacgtctatctgcactagagacgtacatagataaataatgttggtagggttctgctgccaaggacactcttcctgtttcaaccatctccactgacatatttctacctgaaatttatttttatataataaactaacacagtactattcaaaatttgagctcttaacttttttaatgacaaatatacccttctcatcacaccccttgaatcaaactctttcaagaactctatattaaacttccaatttcctaccacttcttatgtgtgtgtgtgtgtctatatatatatatatatatatatatatatatatatatataacagcgcatcttacaaaacatattttattttagaatatatattttattttaattataatatcccgccagtactctagataaaagtaatattttaaaaaaataaaaatcgacattatagaaattgagttttatttttgaaatgatgtgctaatgatgttctagtacacttcacttttatcgtagataaaaatcggttcagcgtaaaaaatagtgggaggtgttgccaataaaagtcaaaagcaaacattaccaagagtgtggaaacgtagcaaactcttttaaaaatataaaaaggttattttaataaatttaacttctgcgcggtgactttaaatttaaataagcgattaacctctcttgaattcctgggtgtcttttcaacactcttgattcggtacgatgctcttggtaatgtttgacaaatactttcggtacgatgctcttggtaatgtttgacaaatacttgagtacaaaatcctctccggtcaaatgatccagagcttacacggggcaattgaggttcagtgcaatcactagcttcctggccgtatcttctttaatggtgattattaaatctgcatttcccaaaatggttccctcgagcgtataatcttgtcaccatacgataatttaatttccaaaagaagaatcgtcgaatataagcctacctaatcattagaattaatcacagaatttcttttttttttttttacaattaatatcagacgaatttcgcttttaattttatatataactactatcagccaatttatcaaaccttaaatatcagtgatcatgatttgtcagtgaataccagaaggaaaaaaagaaaaaactaggtgcccacttgcgcttatattcgacgttgatagtaaagttgtcttgatttttttgaaaaaaagcttatcatctgggatccacaaagaggtgggccggcaattgtatctcaatattgcgattaatgtggtggagagtcggcatcaatggcggagaggcagatggagggggatgggtgatcttccaagccgaaagcactctctgttttggtgaaaggttgagacgtaactttcatttgctgggaagtataagcaggatcgatatactacattaatttgacatcgaaacacatggtaaaatttatgcacatgattacataagaatagctggtctctcacatcttagtcttgtatttcaagtagacaaccatgacgttaacatcatctcaccctgcaaaaaattgcaagatacaaaagaatgcttgacaaaaagagggcaactttgcacttgagacaatctcatgagaccaaactctaagacatcacaagtacgggtgttccttgtttcgtttataagaaagtttgtttcgaaattaactccttttttcttaaataatttgggttttagtattttttactaaacataaaaccatttttaaaaaccttaagaggggaatatcatgacattaggtctacagtggagttgtaacccttttttttacatgaatattaagaactcgtttatttatgtgattgtttgtttttgtaattgtatcacgttttggtttgaaccacaatatataagtgtttgattgcaatttagatctatgtttttattagttgaacccatcactttaccaagtttatacttcaattatgaaaaaacaagttgaacctcacaagtgtggagtgatagattttcttgttactgttgaagcatcgagaatgatcattgtagtcttttctcttcttgttttcttgttttatcattctagaataccaaatatatccaagatgatgtggtgactcagcctccatacctcggtaaagatggaacatgacacccgagatagcccattcattttgacgttgatgcgttcgcccttcgctatctgatcagcaaactttagaaagtttacgcgcattgggcccttacaaaaattgacacttgccaacaaactagaacataaaacgcaggcccaagagccttagcccagaagttcatgacccgccttagaaacccagcccaagtgaaatacgaaaacaaaacaacaattgctctgcctagcaacaattgtttggtggacatgctgcctgttttgttaccttcgtattgataaaagggtgaaataggagaagacgaccacttgaattttgtatatcaagtgagatatgtattatgtagcatgaaatatagtccaacctgattatcgacccggtccagtaatcgggtcacaggtcagatgaatttacttaggtcaaccaaaaaaaaaatacctatataaaacatctaattagttacaaacccttgcataatctcaattatatatactggtaaagcagcagcgaggcagaaggtcgcaacagtacctccttctaccatgcatgttgctgttggactccaagacttggaggctatctactctgaaagatttcacatacatgtcttctttcaaatctgaggatttctacctagcatattcagttgaatgtttcaaattaattaagtaggataaaaaaataaaatatttactactatatatatatatacatacatatatatattacaatttacaggggctagtaccaagttgtgtatcttaaagggataactagataaggaacagagagacgaagaattcaagagagaaaggagctttcaaagattccattaatagactaaaaataagtgaattagctaaattataatacctaactgactaactgtggtatctgcatcagcaatgatgacccgggcaattgcagcaattctgcatcagtgaatcagtgcgtcgttcatctcgttgttttggtctttcagccaaaacgtcgcgtgacctttatacatatataaaaaaaaggaggtcgggtctcacccgggtttacctgggtctgccgggtcccggattgacccgccaggtcgaccgggtttcaccagaccaactctcaagtgagttttttcttagatccagaccggtttcatgtctgggtcagtcgggtcccgggtcaacccatcagaccggtccgggtttcaaaactataacatgtgttgccacggtatgaattgcatgtagcattattcctcggtgtttgtgcactgttttgtgtgtcactgacttcatagttgtcggatatgggcttgtaatctgatgagttaattaaagtttaatttcaatcaaggatatgatttcaactgctcctgctatgacaaggctgccaactgccatacagtgcagtaggcagacaatagtcacatggattatggacgtaacatgtaaccaagagatctgctcgatccagctttagagcatctctcgagcgaggaagacatatttatcaatctgtgtcggcaattgtgaaaagattgcaaaaaaaacatgagtcgggcaattgttggcacgtcctttaataattgatgcgtgtttttttttaaaaaatcattttatatatttttaaaattatttttatatcttcatgctgaaaataatttttttaaaacaaaatatatattattttattatatttttaaataaaacacccctttataaagctaaaacactacatggtgtctttatcttcattgcagaaggtgttcttgacaagccatgtggttgttctttgttgtgggctcatttgtttcaaactttacagaagttcgtttcttgtggcatgaaagattttatcttaactcagtattttattgctgcattataaaactcagtaaaacaaaaataattatcaaagcaagatggctataaaaaagaattaattaaaaaaatattgttttaattattttacaaataaatcacgttcttctctctctatgtatatttattttattgcacaatggatggattttccgatctatccaggttgagtctggaaaccaaaactagggtacaagaattcacccgtagaataacttaaaataacctccgtctgcaccacaactttatatttgcatatggccgaaaacaagcagagccgatcactaacttggccctaaacaataatttgtcagccataagtggtccatgctatcatttccatgactccagcaagagtaattttgatttcttgttaataatagtgcttgttgctatttccatgattcttcatcatcactaatcttgtgattccttgttaacaatagtccttgttgctatttccatgattctccctgacgtgttttatatgatcatccaaaactaatcatcagcttcacttggttttatttttttcgacgcgatccttggacagaagacctatagttaccggccagcctttaatttcttatcccctatgggccaagatttattgttgaagacaagctagcttcactattttcatatctctaccactcaaaaaacagaagaaaaaaggttcatagaaccaaataccaaaacatggcaacttcagctccacttatctcaaaatcccagttatcgtccggcatagaaaccttggatcatcaggagcaacactcgctagatgacaccatcgaaaaatacatagaaggttttggaccggcacaatatctgcaagtcatccttgtgtcattggcatttctgttcgatggacagcaaaccttcattagtgacttttctgatgctgtaccctcatggcactgcactgattttagtaatcaaacttgttactcgagctccaatttttgcaatctctcaaacactgaatgggcctgggatgagccagccagctcatcgatagtttccgattgggcccttgaatgtggcagttcagtcatcgtcggcttaccggcttcaagttactttgtgggctccctgattggtggatttactcttgctacgcttgctgattcctggcttggtagaaagaagttgctcttcctaacttgtctgggtatgtccacaatggcacttatcactgccttctccaccaatgtgtggatgtattcaggtttgagatttgttagtggactttttcgcgcatcaattggaacgtgtgttgttgtgatgtcaacagaaatggcagggaagaaatcgggtggatttgtaagggtggtgggcttcttgttttttgctctaggagcactctcactgccccttatagcttacttgaatagaggttctccatggagatatctttacatttatacctctattccagccatcgtttactgtataatagcttatttctttgttagtgagtctccaagatggctttgcatgcggggacgtgaagctgaagcagttgcaattctgaataaaatggttccaacaaaaaatattagtagctctattctaaaatctgcctacaagcccctcgaccatgagcagtcgaatcttgacatatattcatcgatgaagagcttgctggagaggagatgggctttgaaaaggttgttggctgcaatgactcttggttttggtgtgggaatggtatactatggcatgttcttgggggttggaagcttgggtttcaacatctaccttagcgtgacacttactgcatccttgaccataccttctattcttttgctcccttatgtaatagaaagatttaataggagaagttcagttgtggcctttggtatagcaagtggggtatgtagcattgtctgtgcaataattggtgaagaactaaagactgtccagattatcatgtctttagcatctgctttctgctcgtgtgctgcacttaacgtcctgcaaatatacactacagagttgttccctacttgtgtaaggatttcagccacatcaatgtttaggcaagctataaacttcggtcccatatttgttccactgttagtttcagctgccaggagaaataattctgtagtttatggagtctttggatcagtagaaatatcctgtatcttctttgtaatcttcttgccagagaccaggggtttgtcactttccaacgccatggatgaacaagagaagaaggataatgcaaacgcgtatgtaagctgattataaaatctttatgggtgtctggtaagaaattgaagaagtcaaatcatttatgtatgcatctagctacttttaatattacttctgattaattctctattttcccgcttggaaactgtccgctattaaattttcctctctctttttttttctctccttctcctgtaatttgtttgcatttttgctagatgatacaattggggtagcaacttaattagcaatcaagtttggtctagagcaacatgcagtactcatcaaacagttgatgatctccattaaaccatttggttgacaactagcaagttctgatgggccaactattggcaaatccatggctgatcgacgacttttgcccaccgccgattgcccagtactggcaaacagtcgtcctgtgtatattttttttgatttgttaccaagaaaggaaatgtctggctgtgttcttaactacgctctataacactgttttcatgcttttaagtatgccagactacaattctgaacactttgttagcatatctccacctaagtttgaattcatcaatacaccccaacaaatctccgctctcgggaacatataacttgataaattgttaaattaagatattgtgggagggggaaacaattttatatacagattatttatgattacacctcctactcaagcggcactaggaatttttctaccgttcaaagactgattcaataatcaataccactaggaattcaataatctaattaatgatcaccgtcctcgtggttctaattaattatgttgtagccattttgcccaaagtatttctctcatcgaaaagttcatcatgttttgccagtgaaggaatttgagaaaattatctagtacttgatttcttatcagtatactctaaattagcaatatcataattagagctaaaataatattattatcagagatgaaaaaactataaatattccacatgtaaatagcaaatgcagagaatgctggcaattctagactgctaaaatagcttgtgcaaatttgttttgattctaaaaataataataataataataattaaggagtgggagaccaatccaagtagcttgtagcaacggtgagcgcataatagccttttccctctcttactcgcccaatccatggaattgcagagaactccacttattgttttgatataataatttttatataattatacaattaatttaagacgaaagaacactagctaaaattaagattttactaattggaatattcttcttgctaaaaaaattccagattgtaattttagatttgagtgctctctagtttttagccacgcaatttgtagcgtcagactaaacaatagtaaattctatcgtcaccagggcacaacgtgtaaaagcctttaccaaacactctcgttccaagcgagatataaatgatggttacaggcagggagcattgagcaattggtaggtctaaacaagcttaattcatttttgatgtgtttcattttaaaaaaaattaaattaatatttttattgctttttaataattttaatatgctcatattaaaaatatcatgcatctaccaatcataatgtaaagcattaatttaacccagcaatccactagagtaattgattgggcccattttttaattaattaactgtccgccacctaaagggttacattatcccacatcgaaaaagggaaaaatttggacacctccaactattgtggaatttttatttatatattatatttatttcgtgaatctcaagaactataacatgccaattcatagtcaaaattccatgcttgctatatgctgtagcgataagtttatttatggagattccgaaaataaaaaaggtttatttatggataaagaacggatgttacgagtcatccaccatttctgtgatattatctcgctattgtgctaatccagattcttcatatatattattattttaataaattgatgtaaaaaataatttttaaaaataaaaaatatatattatttttatatattttcaaattattttttttaaataactatatttataatactatacatctctatgctaatatatcaaaataatattttttttattttttttaattattttttatatcaacgtatcaaaatgatttaaaaacactaaaaaaaattaattttttaaaataatatttttaaaacccaaaaacatacactatcttaatagtttatatttcaacacaattattgaatttgagataattattgcccaacatctcttccacggctttactcaatattgcggaaacatgataacaagctgaaagccaccgttgttgctggttttttgaacttgtcaatatgacttgaattgccgatgaaatttcctgctgcacgcaaacgggttcttcagattgtataccatattttgcataattaaattcacaaattgtggcaagtgtgtgccaaaacaagtcgccatcataataatctttcctgtttttttgaagtatattggtcccgtggaatatgtagatgtagcatgttagtggaattaaagatgcaaaggattgattgacgaaagacgacgggtcatgaatatatgtcgacaaagaaatcttctggaccatttaccttgcattaaggactctttatttatcggatatataattcttttggccaataacataagattagtttaaaaaaaaattatcaatgtgttgcgagtaattagttaaaagtcttatattatgttagatttgaatctatagagatgagctttagttttttgaccttcacatacattttgtttaaaaagatgaagctttgcatatataaatttttttaaaataaatatctaaagaaatatctataaaatatttaatataaatatctaacttataagatatttaatataaatattttatatgtgtgtgtgttgtgtaaaacatatatatgtgtacaaaattttattttattttttaatgtataattagagcttccaaatcttgcaaacggatgtctatgagaaaaaataagagggaaaatacttataatggataatacttactatcatcacatgtcaatcttcttctgtccaaggaaatcaaaaattgtttttttttttattaaaaaggaaagcaacttttagagagtactagttattgataattattatcgacctgagtctgacacacatattttacacacagatcagcataccattaatgaaattttctattgccttgtacagttagatgtattattattattattattaatttaatcgcccgcccatggtctctgtgacattgacatggatacacatcacagaacaaccgatggattctaaatagataggtttccagctcatatctagtccgaattcagatattcacatgtaattaatttattagatccagcttgtttaaaaaataaatttaatatgatatattttttaatattaagattgaaatatatttaatggacttgattatcaaggcttaatctatcaaatctgcaatttagattataaagtttaaaattttatttttaaaaaactattttttacttagctatacaataataaaaatagatgctcgtaaaatgaagtacaaatcaaatacatggttatttctttaagattcttataaccttataaaaatgaaattgaaaaatttattaaacaaatttaaaattaaataaatattaaaaagtaaaatggaaaaaaaaataaaaaagaggaaaataaaaaaaagcaaaaaaaaacacctcttttaccggataagttgacacccaactattttaatatagcaagtaatattaatagttttcacatagcattgtttaatagtgaaaaatattttatagttaattatcaatattgattttataaatctattttaatataaaaaaacatgtacaaatataaaataaatcatgataaaaatatctatatttaattttatttatatgaaattttctcttatatatatatatatatatatatatatatatatatatatatgtataatttgtatgtaaggtaagaaggttaattgttcctacccgttatctagaataatccatggcgtcacatatgagttgctgatctggcacatagttatgataccatgtgctgttctccgccactcttctattttaagttcttccaaaatcattagtaacaaattaaatgttgtaattttaaagtattttatgatatatatatatatatatacacacacacacacacgcactccacttgaaaaaaatcagaaattttacacaattaaatctccaaattttaagttgatagagtattagagagaattatatgctgcatcagtgtatatatatatatatatatatatatacttaattaattaagagtgtgtttattttgtgatttatgattttaaaaaaatattttttacttaaaaaaatatttatttttatttttgatattataatatccaagctattaaaaaaatactaaaaataattagattaataatttttttttaaaataattccagtaaactgactctcaaacacatcataaacacatcatggaccttctgattgaccagtccaaaaagaaaaaaaaaaatacgggccaattagacccctataaaacctcctccctcttctaagcctaaaacccatgagattaaggtatttgagtgattgtaactaaagtatggcagattcaacaccacttcttctctctcgaccggacccttccaatgagtcaaaacaacctccttcccttgatgaaaccattgaacgttgtattggagagtttgggctcgcccaactcctccaagccatccttgtgtcatttgcatgggtgtttgatgcacaacaaacattcattagtgttttcactgatgctgagccaaaatggcactgcacaagtgattcatgtacttcagtctccgacatttgccatcttcctcaaaattcatgggcttgggatagccctaaggacacatcaatcatatcagaatggggacttgagtgtgctagttcaataatcaaaggcctacccgcatcttcatttttcatggggtgcctcattggaggactgatgctagccacgcttgctgattccttgcttggtcgcaagaatttgctgtttctatcatgcctaatgatgtctttctctggattattcactgtcttctccaacaacatatggatctactcggccttgaaattcgttaatggtgtcggccgtgcaacaattggaacatgcgcccttgtgttatcaactgagcttgtagggaaacgttggcgaagccaggtaggagttattggtttcttttgtttcacgctagggtttttaacattacccgcttttgcatatatgaatagaggttcctcttggagaactctttatctatggacttcagtaccaacaattttctactccatattagttcatttcttagttcgagagtctccaagatggctttttgttcgcggacgtaaagaagaagccgtgactatactgaagagtattgctacggctgggagtagtggcatactcatgagcttctcaaatttggaattcgggaaagagtcatggaatgttgatacttattcagcaatcaagattctcttaaagaaaaagtgggcttgcagaagactgttgacagtcatggcagtggtattcggtattggaatggtgtattacggcatgccattaggcctcggaaatttgtcattcaatctctacttgagtgtcacatttaatgccttgtcagagctacctgcctcattagtgacattcttcctcgtagacaaactaaaccgaaaggattcgctgcttgttttcaccactctaagtggggtttgtagcatcctttcagttgtgatgggcgagacatctgcaaatctacaaatggggctggagctggtatcttttttctgcgcatgtacagcattcaacatttcattgatccacacactagagttattccctacatgtgtgaggaattcggcaatatcaatggctagacaatctcttgtattcgggggtatgttcagtccggtgctggtggcggttggaagtaagaacaggtttctgtcatacgggatatttgggatggtaatagggatttgtgggttgtttgtgatattcttgccggagacaaggggcaggacaatttgtgacaccatggatgaggaagagtacaacagtacaaacaatgatctgcctgtgttggggtgactcacatctagaactaaaattgattttcgtgttggctggctggtgtagtaactagtagtagctagaatcattttgttttgaaaagataaatatagtggtatcttgcataatcaaattaagttgttggctttgcaagtggccactggtgaaatgatattttgtgcattgcagacggacttgtaatgaagtttgtcttcctctgagaagattccgcgtgtgtaacttcattttgttcgtcgacaagcaaattaatagacggcgtggaatgattttttttcatgtatatatggaataatgtatggagacatgaacaaaacttttggctgctagtaattatagaaattttgtctttttcaaaaaagagtaaattaagttaattaattaatacactaatattgccggcttgcttgttttttggaacaaaaaattgcttatagatgttttaaagcttatcttctcgacgggcagccgccacatggccataaaaacgacaccgcgactttgtctctcttatctgtttgcttagtcatccactcgaccagtaacaaaaactagaaaatatcttacgtttggagtgaagtgcagggtcctcattcgagccctgtttgtttctgtgtttcaaaaatatttttgacaaaatttgaaaattttttatttttttattaacttgaaattaatatgtttttagtgttttcaaatcattttgatgtgctgatgtcaaaaataatttttaaaaaataaaaaaacatcattggcatgcattttggcacgaaaagctatttgaaaagcaaccgcaaccgcaaccacactgtcaaacaaaccctcaatagcgatatttatgtttttatgtatttaaaaataatcaaaaaaaatttaaaaaaatattattaaatattattttgatatattttttatacttcaattacttataaatgatttttggtgcttgttaacgtaatctaactatattttttaaaaattaattttttattttaaattaattttttaatgttattttttaattttaaacaaaatagatgttaaataagtggagaatgaggtgtcaaccactaaccctaggccaatgcggttgatgtaggttcacttggagtgaacagtgcccaattgaattatattcacttggttgcagacgtgagagttgcttctcacgaaacggtatttcttcaaaaatatatatggattccacatgaaaagctagttaaatttttatattatcaaatttgatatttatacggtgagttttaaaagcaaaagttaccgtgtaaacaaatacctacacctggctctattgaaccgttatttaatcttcaatgggcttgctcctaagtccgaaactaatttgtcatggaattgggggcaggggtacgtgggcttccgtattcacatttaaaccaacgcggattaaaggggtttttttttgttttaaaagaataataataattgttttttaaaatattttttatttataaataaattaaaataatattttttatttttaaaataatttgcttttgaagaaaaactcctagctagataaaaaaaaaaaaagagagccaaaagccgtagcttttccaaagggtctgatcaacctgcttgcaacgacaaatacaaataatttcagtaactcttcgattttatttctatgattgttatggttgaagccccgagtcttccatgtccaagagatagccaggttttataattaataagatagtaagtagtgatgggatattttttttataattaaaatcgaattacgtttttgtaatagttgttttatgttggagttttgataaaaatagatttaaaaaaattatttttaattgtgattgatttgatttaaatagattttttgtttaaaatgtatttgaaaacattgttatgtgaataacatattaaaattttttggttaaaactatgatctaaataacttaaattattaaaaaaaataatttacacaataatcatatataatacattggaataataataaaaataaaaaaagacattgaagaataaaaaatagttttcttgcagcagtggcgcttgtcatcataaatagagatttctctaaaaagactatatattgagaaaaatattacttattttaccagaatcttggctcagtaatgtgttcttacaataaaatttcaagaaaaactaagatagtagctgatgatttctttttcaaaaaacagtgaatgaacaaacagaaaattggtcctacctctgcaaatctctctcccactccttcatttaccattgaatgctgatcttacatgcactgtacatcattttcgatattaaaacctctcaactcttttcaaacgtttaattctaaaaattaagaactacgtacaatgatatttgtgtttgtgtgtgattgttacgtgccaagctggctccatgcatgaatgcacgatatttgatttagtcttgatgatcgaaatcttatacaagtcgtaaaagcaaatcagtcaagtcattgaagactaacgtgcttagttttctttgaagtatagaggaggttgatctttgaagtggaatctgctttgcccacagcaacacttcatttgcaaagctttatcgatcacaagggttgaaaagctgttatttttgcctataaactactacacagcctattcgtcagcactcgatcgacaatatattcctgaatttaatactatttttctgtctgattaaacagtagataagttgctttcaaggttctagacctcagttcatgcacatcgttgttaagtttatttcatcaatcaactgcgaaagcaaaggattatatatattaaaaaagagtaatgatcatggccaagaaaaccataaaacagcattcttgctggtgttatttgcttggaaaaattactaatcattgttacaagaaaagcattaatttttagaaaattagtaaggccatgtcacgaataatcaatgcttactaattaaagtttccaggacagcatatttcttcagtcaataaattacttgaaacaatcaagccacctctaattagtgacgttattagtaatttctatcaagataattaataatgtaaaagataaacttgcaaaccaactaggctaatcccttagaaattcaattgtatagggattgatcataacacgctataataatatttttttatgaattaatgcactataattattttatgatttttttaaggttaaaaagtgtttataatttggaaaatagctgggtgacacagcaaagagagcatttttagggcccggaggaagtgaagagcagggacggagccaggttattaggttaggagggggggggggattataaaaaaaaaatatagggggctaaaatttaaaatttattttcaagtggtaatctaaacaatacaaaaaatacaacaacaataaataaattattaaagaaaaacacaaaaaaacaaaaaaaaatacgcctaagactatttgaatgatcaaataaccaagtactgatctaataaaagacaaacctaaaaaaacaaagaaaaactcagaagaagaagaagaacacacaagctttaattaaaaaagaaaaaaaaagcaagtttaggtgaacctcttaaacctagtctaaattatataatttgcaattcgttaaatcctaaacctaatttcaattaagaaatttaactctcaatcaatttaattttaaatgatgaaatcgttaaaaaatattaataaaaaaacttgcaaaagcacaaagaagtgagaaataaaatgaaaataaaatttgagagaaaaacctaaatatgatgaaatttgaaaaaaaaaaacaattcaaataaaataaatagaaattaaaataataaaaaataaaatttaaaagattaaaaaatcacagggaggtaaaattaaaaaaacatatgtaatataatagattatttatagattaaaaaataatagaagtgaagtcgaaaaaaatatagagggttgacccaataaaattaaatagcaaaaaataaaaaaatattagcttaattttttttattataaaaaataaaataatttatttttttatttataaaaacctttttttcattttttatatatatatatataaaagtccatctcacagtaattttagacaaaaatatttctttacttttaaaaaataacgtaatcattgtagctacacaatgccaataacaacgcttagtcttattgtaagaacctactcaaccaatatagattgggcagagataatgttggcccaggaaaagcaaatcataagaaaaggtcgcttcttcttgaaaacacatgttttcttcatttttgggctcaatgaactgtaacgaaatgatggaagagcaattgacaccaacgcactcaattagacctagtgctcatgagtgcacctcaagtttaaattccaccacatttccgatttgtctgcttttagggtttttgttgaattcttcttcgtatatttagatgcaagacatgatgatgaataaaattaggcaacgacaatccacgtcattagaaacgtaaactgaacactcaaggacgccttctgctgctttgcctcctgactattctaattaattagaggaataggcccgctggttagtgcagggatcttcgcgcaattcaattcaatattatatattaagaaaataccagaactatatatgggtaaatcgaaaaataaacttaaatttataatagaaaacaattttaatataaaaaaatcaactaaccaattattgagtcaccataattaactcatctgacccaacaaagtcttaatactaggaaatggaccgcttgatcaatctcccagaaagttaacacaacaaaatgcattactgccctccatacacaatgttttgccacctggcctgtattgctcggaaattcatgcacttgccagtcactgtattttcttcccctccaccttaattcctctgggtcgggtagatgtgaggacatgtcgtgcccgactcaaaaaacccagcgtgctggcacatactagtagtaggcgaacatatcggatataaattgagatctttcaggtgagaggagtgatgggattaattcctcaacattttatgttgagctagctagctaattgaaggatgcaggagtagctagttgaatcagctgaggaagggagtggagaatagagatgggccataggtgctgcagcaaacagagagttcaaagagggctgtggtctcctgaagaagatgagaagcttgtcaaatatatcgccactcatggtcatggaagctggagctctgtccctaaatttgcaggtataaatgcgtgtgtgtgtgtgttaatacccctttttttttgcatgcattagaaatcaaaatcaagctatctgatccatttttgacgcatactttgctttgtacttgcaggtttaaaaaggtgtggcaagagttgccggttgagatggctgaactacttaagaccagaactcaagaggggttgcttttctgcgctagaagagcaggtcatcatagatgctcatagaattttgggcaacaggtaaggattaatatttgagtctaaataaggaaaggtagaaattaaaataaataaataaataaataaaacactgtttctaacaatggggacggtagatcactagatgacatgaatagagtagaagaattacttagcctatatattctttcactgcattttgattacaagaattttatacttgtaacagatggtctcagatatcaaaacatctcccaggaaggacagataatgaggtgaagaatttctggaactcacgcataaagaaaaagctcatggcacaaggcttggacccaaaaactcacaacttgattccttctcatcagagggcagctaataaggttgcatgcaatatatcaccatctaaccaacaacccctttcaattatctcccaggattcaaagatgaaagatgtttccatggagataaaccctcctattctaacactagcttccccttatcgttctcatggcagcactcgactttcgttgcttcaaacaacaaccggcttacccttgcccacctcttgctatgataaccctagtgtcatttggaatgtaaatactcaaaattcttatgattcttccctttttccttgcgtgtcatccattgagaactcacgcgtttccccttcatcttcgacttcggtgaacccaactgggtttggtctcctagatgaagattgcttttggagttgtagtaacattgttgagccctttgaagccgcaaaattattcgaaggcatgcgatcacaggatcaagaaaaccagctgaacaagatttgtgacacacaaatcgttgataagaataaaggagttcatgataatatggatgcttcatttgacacctctagctatgatcttgagttggtcgactccacattatttcctggttcaatatgtcgtgatcttggctccatggatgatctttcatggaacttttaggccaccatatgcgtgtatgtaactagcgctacagtaatagatagtaggttttgctcaggttgtgcatcccatatatttgataaggaaaaaacgcttccatttcttgctaacaattcgggtgtgaaattatttgtgataccaatcaattccattattcatctaaattgggaaggtgctcttggatgttgagtgatcatagatagccatcgcctgaattaattttcccaaacgcatgttctccaccatcccgtgagttttgatgctatgagaaaattttgattaagcctaatcctgtagtttgcctcttaatttatttgtgttcatccatcaattttgtttttatattttcaatttatccttatatatatatttctagtttgaattaactgagacaattactaaaatttatatgaatcaaacgttagttttaaataacatgagattaagtaggtcggtcgaaaaaaaaaacaataaaaaaaaaacatttaggttagaaaaggtaaataagttttttttgttattgccgttgatataccaagttagagaaggcgtctgtatttataacgaattagataaaaacattgagcataatcacaccgtaattatttttaaatgaaaaactttgtcatcattgtaaatataagggtaaatttttgaatttgcctcctaaggtttatttattatcttgatttatttcaattagacctcatatctttcatttttattccagtcaaccttgtatctttcaattttgttctaattttcttttttgttgagcgtaaattttaatttcatccctaaatttataaaatataatcattaaatgagtagagagaaaataaacgaattggagtcagaaaaaagtaagggatttcatttcttttttagaattcttagtcaagattttaatagagaactggataaaaaagtataaatatatttgagagtgtataagagacagtgatagtgatggttgatactttatattaaaaagtattttatatcatattaattataagttaaatttaatcttgtattgggacggtgttaatgaaaaatatacctttttatcatattttttaattaaaaaaatgtctttctttaattattttttaaaactccaattttttcattcttatattttgaattatattatgatattccataaatcttaatgataaatttgaaatttacaaagagtggaataaaaataaaagatgcagagtttaattcaaacaaatcaaaagttaaattttttttgaataatcatcaattaggaatatattaaaaaggccatagagttaatagcaaaaataaaatacaggaacatgattaaaaaaaagttaaaactgtagttgagaaaatgcataaaccttgagaagttgaatttcaatttaccctaaattaaatttcaagaaaagggatatcatgagcaatattattcttatatttattttgtgggcgtaagataatgcttttcttcgttgctagtaaaagcgttatgtatgtgggtattggctcactaaaacaaagaattaatctaattaggtgcatatttagcccccttcccttcttttttttacattaacacccttagatataaataatttgaagtccattagctagacggctaattaattgggccttcaactcgctcccctggccactgcctgatgggtcaattctaattacctagcccgtgatgattgtggtaccaaagttacaaactgggccagtatcgaaaagcccatgtattcgtttacttgacccagcccatacaactctctttcttttctggttcccattggcttgaaggcggaagcagcccgcatggccatggcccatgggactctacctgcagcctccgtccccatccacacaaatcttggtccactgacctgggcgatgaccattcattcggttcttcctttattaatgttaattttcttgaaataccgcttggattttcggaattacatttctaagagggaaaaaaaaaaaaaactgtgacagcactcgaataatttgttctgaaattctctatcatgattttttcaccggacaattttatcaaatatttcgaaaatacaaaacctgaaatgcccttgattttatggtttatttactgttccttcagcgcgcctatctggtagcactggggacctcaatattttgcaaacaatcttacttttcttgctactgtcatgtggtgtttctatgcattaaaactataatccttcttctcaaaccgcttaaaaatatattaaaaaagtatggaaattaacttcctgaacttgtagccgaagccactcccattctagtggatgtacattcatccgtaggtttcaaagaaaatgcatgataatgatacgagtctccaacctcctacgtccaatatttttcccctttcgacatttaattacccgaagcttttttcttttctttgttgccgatacatatccaagcagttaagttttccactcggcattgggactattattttttattttggctgaataagcaactcatcgatcatcagttctcaccagtataaaattatggagtcccctaagttactgtgtgagcattatgggctcacaccatgatatcacggcttctttataacagggaaatcttttgtgcttttactttggcagaaacagtacttgattataattccacagtgaaacagagacacgaatttccttttccaatctcttttcaaagctggccgagaagtttcaacaattgtatgaaaaaaaacgaaagataaaaacagaaaaggaaacgatggcatgccttgacccatccttgtccaatgaagtacgtgtataacctgatcatgtggttggcaaaataatccccatttttttcttcttttttatgcagcccatcacaatatatcctacctttgtgcagtcaaatgaattttagtagtgatacaacaatatctgtaaggaacattaacaaaaaaaatatttgttactttgtggtcatcctaattagtggctcttagtcttgcatggggagtacagtattggagttgtcttgagaggaacataaagagaagatctcttctagtgttccgttcatgcaatccttgtacatcatgtagtcgtcgattatttcaggcttcgatggcttcatactctcggtgatactaatctgtgggaaatcctcaagttctaaaggtgggaacggaaactggtaatgcaagcttgagcagtttggcatctgcatatcctgcatccacagcatgtcgtgtgattaataattggtctcgtacccaaaaaacccaaaaaacgagagagagagagttcagaggagagttggaaaaagcaactccttttgaaaattaattaaaacagtaaacctagcaacatgttttgaattggaaattatttcaaaatgtgattcaaatgggggaacatatgcattggaaatggtgatgtttgtggtgtcacatatagtagacccagagagaaaaatcaggaagaaagatgtttgaactttgaattatgttcgagtcagtcaaaagaagttattggagatggtgaaaaaaaagctaatttgagtcagtgcttgagagatttttagaaggaagctttaagaaaagacagggagtttcattgcttccaacttttgttgctttaacttaagatcaaaagaaagaaaaaactcaaagggcttgtgttgtgggccatttccaacacatactggcccgaggattgtactttcattctctgcgtgaaacacaaccacgtggtattttccatggtgtgaacatgaagctttcgcatcaaggcagaatattgctggaaatgtggtattggcaaaagagatgatcatatcatgatcagaaaaggatgacttggagaagatgattattgcatgtgaatcttggcatggcccataccatcaataacctaatgtttttttattatccttccatgtcacacacacttaatattagacatattctatatatatatatatgcagttaactaaataattactaattcttggaccgacattaactagttatcagcagatcaaaccataaaaaaattaaattaatgtgtaaaaggaaccttgtttattgtacctgaattagatttgacgagaaatccacgcccattgaataaaggctagccgaactgttggcttcatctgagggaaacggagcttgtaaatcatcggctattgcagtttcaattggagtcccttgagtgacatccgaggaagatgtttcagatggaaatttacaataatcattgttgaagttttcatcttcagcttctctccctttagaactttcaataccgcttgtgtcatcccctaataattgttcttctgagacccacgctgcatccttctcttcattcccgttatttttttcttctttctttttcggaatatgtattgttttcttgaaaacacggcataatgcgtaggaatcctgtggtgcaaaaataaacataaatttgttaaagagaggtgtacaaagatctgtaaaagcaagatcacaaagagcagaaaaggaaacaagaaaccaaacaaagatagttgtaagtacacctaaagtcatgaaacaaagactctttcatcatcatatatgttgatgataaggtattctttattaaagagagaacatttagcaggaaaaggaagatctaaaatgatatgttggtgtatgaaaacaagagcaatgactaaatgtgacaggatctgctctatatatgtgtttgcgtatctgtcatgtaaagaagcataatccatgatggtttttcctcgcttgactacataaagtcctggcttaatttgaaccgtgctactgctccctgtatataatatgctcttgaaaatgaattcaaaattgtttctaaattttttaataatttgaactggaagaagctacatggagcactgaaattaatattaatattaattaattttacccgcatctgaaagatgaacataacatacccctaaaaaaatactctcaatttacatcgatctgtcattgttactaaggtttcctatgagaccaaaaactctcttgcagcctcgtgtaattcctattgaaagttcatcactatatatcttctacacaaaaccgacaatcaaactcatttagttgtctttttgtaaaccctaatagcctgttactactggtctacatatatatgaatgccaccaaaaccaccagatggggcagatccaacttcatcatgatgcatggctcgatgttcataattaattaattcacctacatgatatttctgaacattaattatgcaatgggttaaatctgtgtccctacttgatcaaatgaaaattgtgccgcaagcagccagtagtgaaagtgcaatatatacctttaaacttgatggtgcagcgccacacaatgagtcgatcaagcgatactcatgcattacccagttggttctaatgccatggggagctctacctctatagtacaccaatgtcttcttcatgccaaccggccgcttttgagagttcactggtctatctttccctgtggctttccagtaaccagcttttgttgccctgttggttcttgaaccattagggtacttcttatccctagggcttaagaaataccactccaaatctttgcttggtaaaaacgacttatctgttgatcgaattatcacaaaaaaggttgtcagaaagaacactaagagcatacataagaacatatgtaggtgatactaaatattattgatgtaagcatggaaattaattaattacatatgtaaaattaacacgtacctggtaagtcccatggctcacatttatagagatcaacctctgggataatttcaagctcaattgtgcggccgttgatttttctatcaagatagtaaacaacaagctcttcatcggttggatggaacctaaatccaggagggaggctcacgggcgccattgctgtgatgacaatgatcgaagagaggaggggtgcggggaggagggaatagtggcccaattgatcgagaacgtctagatcgaggatagcatgttagtactaaactggcttgtacgacatcgaactatataggccactgttttgttatgacagagatggtaacgttaattagcccttcgactttttatgtattacgttgctgccattcactcaagagaccagacctgacatctttaattaattcccctgtcccttccttaatacactagatttttttgtcccttcctagatacacctatcagaaaaatgtttttagttaatttaggagaggaatattatgatgtaaacgaaggggtatttatgttgataaaatgaattcgggatattatacagcaacaagtccttcggcttttggagattctgtgagtgaggctctgtgtgaaaacatcagggaggataagcagcttctctgcttttgtctgctcacaaactaacaagaatcagacccctcgagaggatgcgtgggccaactaaaccgcccatagcctacaacacgcaatactaggcctccctcccccttcttattttaataaacagtactgtgtgtaataatcacattattgtataatatatagttctttattggagggagtttttattgtttattatgtgtagaataatagtataatgatgttagttatcgttgttaatgtgtgtttataattcatatattagttgtgcaatctcgcccttgtacacttgtcgtgctgtcgtgcaaaggcgacctggctagataaaaagagaggcctagcaatcagtctgtagctcaagagaatctgatcgggaataggatgatcatgtgccatttaccaaaaagcaacgtgatgaacaactcatgttctctgctgccttggccacatacagtgtagttcttgtaagtttcttgaaatattcatttctttattcattcttattgaatcaatgatttgtttaatatatagtaatcttaaatctcttgagtggcgcagctggaaacttagagagattcagccgtgaaagctctctctctcaaaaaagaaaaaagaaaaaaagggaaccatcaatgaagatatttcataactgatgatgatgggattccaccttatatccaaaatcaacatctgcatttgtagtatagtatgcttggtacgtagcgtacgaattatgtaatttaatgtttaatgccatctttcaatatccttgaattattgcacatttttgtactatcaatttaatcaatatttttttgatattttaaactaaattttttatacatgccaatgagaatttaattcactttcataaataattcaaagcttgttaaagtcaggaagtatttttttaaaaaaactatcatataagaccaaaatgtaaactttcatggagattgaggtgtcatcgcataattctcaagcaatattatacttttatatttcattttaaaatatttaaaactgtaatgaaatgaatggttatgatctttaataatttatcattaaaaaaacgtaggagtgttacataagaaaaggtcacgaaaggttactaatgtacaagaatcgattcttaaaagatgcatggcattactcttgttgaaaggcaatggtatatatatatatagtccagagagaatataatatgtatatcaattgtgtaattcaggcactacgtatattgtgctgcatatatatatatatatatatatatatatatatatatatatatatacacacatgttatataattaataatgaattcagtacacttctagttaaaaacacgactgatatccatgcttttcttcatgcatcctgattaataacaattgtacgttgatgatgatcacaattaaaaaaatgacaggcctattttgcattatggcccaaagggtaatgggtggagccaaaagtctttcccaaattagagctacgaatctatccctaattaattaacaagtaaatgtctaaaattttcacctgaaatctctacgtcaaactgtcaaagtggggggaaagtaggctagttggtaaagtgtttaatgcaaaaattatctccgaaaactgcatgcatatacaggatcaaatttgatgcagatcaagagcaagatatattaaaataaagtaaaggaattgaaagattcaatatccatggggaaaagggagtaaattaaagatgtcaagccggcgaaaccatcgtcgatctttgtttggaatgcgtaaaatagcacagatttggattatcaaggtggggaaaacacgattcgacctgtgagcgttcttttaaatttctaaattttactttcgttggtccacatgtgggtgcatgccttcagtttaacgtaaacaatctgggaatttgatgggccatatgatgggcccatgtgaaaattctctggccttcttttattcccggatagaaaggaacgcttttatcattcaacagttgatgacttgaaggggcccataatagaaaatctacctggcacaccgtcacagcctagaaccctagactctctttttctttttgttttttttcgctttcttttcctgccatccaaactacttgtcctttactgttttattctgtttctattaacctccccctttgattcctttcctttccttaaaatatcatttccagacgagtaaagacatcctaccaactttaatgattacagacccaaaatctttgactgctgtctgatctctctcttttctctcaaactccaccgcaatatcatcgatcgatgtactcctttggttctaacttctaattatatattccccccattgatgcagaagcatgatcaaaatacatagcgcaagggtttgatttgcatgcacacacactcttagctccacagtttaccattttaagcacagcaaaactatatacaatccaagctagttctttgatcggcgtgaaatcgaaatatacatgaccagtaaattatagcacgctagctaactaagatgaccaaacccaaatgtctctctagtttaatttgaagtccagtacaccgggtaataattaaaacacaacgggccggagaaaacatgtagtttttattaaaacgtaagctactaactttgttgggagttccagctttctcttgtttggatgagtctttatggttcttacgctcaaaggtggatgtaatttgaattaatttttgtgcgacccaattaaattgagaaagagagagatgtagggtttcaagggtcttttgccgaaagatccttttacattctttactagccacactccacaatattcatcacgtattaacatagatatagtagctagcttcacttaagaaccttgtcaaccttgtatgtgaattaatatgcatgaacaagaagcttttgattagcataaaagagattccgaattcttctttttcaccaatgggattgcgaaaatatggtagctagctagacgctcctacatgtaaaagaaaaggaaaaagcaacttgatccatcaagttctaactagaagttatagtacccacattttgattctcatatacagttacgtagcttgccatataccacatgggtttgattcattctttattaatatagttgtgtttctttatttcagttgttttttcctttctcaagaatgatagacagtagtgttgttatgttaaatggactctaaagccaggcaacctttcatacgatctaattaattaagcaacagaatttttagatttatttataaaattttattaacgggctcacgaataaaaataatatatcagaaaaactctcgtcggtgatttatggtatgccagtaataattttatagatgcatttactgacgaacaaagcgcgaaaaaaaaaatttgcttcattctgtcggtacttccatcgctgattatacaaaaaaaaactatgtcattccatcgatgaatttgacatgtaatcgtcaaacagaccgtatgttattctgtaggtgagtaaacaggggcagtgacatttacaatattttttttccaactctttgtaatatactgatagactatgtccgtcggtaacccctgtcagtaataatttaaaaacatatatttttaaaaaatctattaaacagaaacaataaaaattaaaaaaaaatcaaatatttattataaatttaaatatttacaaattcaaatataattaatctaaaattgaggtgctgaaggaggaggaggaggagacctatgtctcaggtgcctattcttgatcggcgcctgatgactcatggttgtcagaagcgctctagcagcgattttgttcatacaacatgctattgactattttctaggtatctatataaattaaagaattaaggtatcataaatcatttatgttttaaaaaaaaacggcagcacatttcctatatggaagactacctaaattttttaaaactacaaatacacaacaatttaaattggaccgtcacaaaccagttgattttatttcaatccatgttaatcgaataattttaattatattaatttaaccagattttcaattaactttgctaaggtcatttgtgaaatgattataagaggttaatattaacacattctaccctaaccatactctttaatatgaaacacatattcattgaggaaatacttgttatagcacttcacttatctttcaggacccagacttaataaattcaaagtaacactagcattctctctcaattgataaatctagtacataaattaaatcttcatcatagttaaggggaaatgtataatgaaattaagtatcccgagagataaggataattaactagtccttacttgtgttctgaaccacatggggaattgtttatcttgtagtcgaaagatttgggattcagtcaaccgtgagttttcgactaataaaaattgatgatgttacctatgagaaattcatcaatttatcaatttatgatagcataagagataaattattcgaaagtaacaacatatggagaattttacctactgaataaaaggtcttagttcatcgcagtttattatttataaattaaatattatagacagatttaaatctaccggtaattatatctgtaaaaattacttgttattgtattttttggttattttttatcttttttttttaatgtaattttctcagtatatatttaaaagaatatttttattggtgcgtacggataaatactgcaacgacatgttcaatcaggaaaattcactataatttactaatggtatatttctagcgatgtgttatttatatttgttaattttttgatacgctgtgaaataaagcaacgggaaacacaagggcaaagagatcatggatcgatgcctgggtgtgatgtattggtggattgtaacagtagagcctagagatggcagttagcgatccataaagaataaagagaaagggattccaagatgtcggctctaaatctagcttccattttagtctctgcatacaaaagacaaatgttcgattcttcttccattacacgtaacatatacgaggtgtagctttcatggtatagctgcctatggttttgaatgcgttgtcatgacctcgtccatccttttctcccatgcccaaggaatagcgctttgccaaacttggacccctcacgtcacagctgagatttgaaagggaccatttccatttttccacaagaagtagcagcttgagagagaacggcaaatggacaaagcaatcttgttagggtatctagtcaatgtaatgatctctggtaataatgagaagctactcgaaaaatctgatcattcttggataattgtagctagctattccggagtagaagaatccccaacaaacaaaatacattattcttcaacaaataaataaataaaatgccgtgtgtgtgagatgatcggctatctagctatatagcgcacggcaaagtgaaaattgagctccgcgggccttgtgtgttttcaagaatgaaccctgtttaatttaacgggtaaaaaaagaaaattggatctatctgcattcagatcatgtttaacccttttaaattatctagtcagcttgtactgttgaaggttcgaaactggtaattaattaacatcgcggtccattctacatttttatttgaaggtagggcagaggagtggtggttatcatggccctcgatcgggaatatatttctccatccagtaccacaggttaacggggatttctctctttttttaaaaaacactctttcattatgaggttcggatcacaatgagtcctgattactctccatcattactgaattcccagttcaaatcgagatctcttgccatatttactaatttgattattttttatttttttattcgttttaatacgttgatattaaaaataattttaaaaaaataataataaaatattattttaatatatttctaaataaaatatattttaaaaaataacctgtatctcattattaaaaataaacaattttcaatatacctgtgttagcccaaaagtgattttatcatccaacaattctggcccataagttaggtgacatgtttgctggccattataccttgcccaaaagtaccaaaggaaaatcttgagaaaatacgggcccaaactaaatcacgcttctgggcctccctatctttgcttcaaactgcaagggccagccccagatagaatcactcgttaagttgaagcttcacccaggggaagatgtcgatactgtggaagaagagcgaggcctggaggtggatagtgaggatgacaagagactcaaagccattcttcttcgcattcgctgcatgatgcggtgtcgttccaggtgtgattgggtatttcgtgatgcaaaccaccaactcccgcaaccccgagctcgaagcccgcctccgttagaacgcgcgtcccgattcccctgtacgtacgttatatatacgttatatatatatcttgaatcaccgttgattttctccataaaaacgtttgatctgcagatttttgggcatggcccgctatttgtgattattgacatatcttaattcctgattattttgttaacttggttatttcaagaatctgactctgactctgatgctatatttttaagtagtttagcatcgaatgctagaaaataatatatgaaaagtacgttaatcactcatagatatcaagaggaagaatggaagggcggtaaagcttctgaaggatacctcaattagcatagagttgcagactagtcactggatactttatcttggttaagcttccaaatttcaatatatggcagatggatttcacaggtaaggccacttctaactgaagtcatcttttggtaatcacaggaatgaaagtgcatggcagtgacctcagagtagctgctttagatacttaggttagttcctctttaatttctgtctcatatcctagagttaagattgccccaaaatcttgggtcatggttaataattatcacccttttgatcttcaaatggaagtacatgttgacaaattttgtttgctcgaatttctcaatcagatgatgggtaaagttaatcgagagagactggcagaataccttggcgagctgcagcggaaagaggatacaaacgatcgctatgtagctgctctaagaggggagacatttacaagaaacccatatgtaaggattcagtcaatacccaagcggaataacactgaagctggcaaggagcagaaccttgataacgatcaaaggaagcagattagttgatggttcttgctgatgtgaccctttctatatttggtatattaatgtcatggcagcacaagaaatgcaaagtggtccctttccttcttgttacgcaacagcttgtagcctgtgttttatttggaatatttctgctttggtatggttttttcatacccgctgggaatgacagcaattatctcatattataatgtttctaatttgcttttggttttgcatcttgaacccaaaatgcttctcagctatttgcagtttcttggtagttcatgaagatgatgtcagtgcctaggcatacagggtacgataataggactcatcgtaatcgcatcggaacgaaaagtaagtcattgatgaatttctgacatcggtggatactatagttaagcatacaggatacgataataggactcatcgtaatcgcatcagaacgaaaggtaagtcattgatgaatttctcacattgcttacttctattcctgttaattttaaagttcaatgatggcagggaagttgattgagacagaaattcatacaactttaggctaaaagcattttgggcaccttcttaacttcgggtcaattttgctaatgagcagctgtttccctttcgaaaagcccttgcaaccccttgaatttgcagatgatcagtgtaaccctggggctaactccagtattggagttgagaaggaggttaaagacgtgcaggggtggcttttgacttggcgaatcgcttcccaaagccgtaaattatattctaaattacttacagatgaagtgattccacaagctaaattttgcagcatagcaaatatacatcattctcaaccgttaaaataagttctgcatcaactttagaaacagaacaagatacagagcgaagaaatctgactctgccttcacactcaaacacacgctcatgcgcatacacacaaacacgcactaaaagaaagcaagagaaccacatgtacagttcaagatacaattcccttgatccagtcgttaagcaaacagcctgatacggctggtgattggccggcggcatatagggcaactggatactctagatccacagtctctacaagtctacaaccaagcaacggtattagtatcgtaacaaaaaggttaagcaaaaacaaagctggcaatgtttatgtggcagctcaccatgtgcccacagccgaaggccaagtcctttctattagtcagacaaatagggcaggcctataatcaaattgaaaaacacatttcaaagttataaattatagacgagctacaatgttccagacaaaaagacagcattacacgagattattttcaaacctgggttctttcatccaagaccggagaagaaacatgggttggttcacgatctagcactggacgacgagaataaggaactggaggagggcgtggtacgattttctttgcttgtcccatggaacgtcttttatccaaaggccatttaaatatatgagacaacacgtaaaaacaaatggatggtatgcagaacaaagtggccagtgcattaggaatgctgggaaacgtaaaaatggaaatccttccattgctgttttctctttgaaattgaaagggcaagccaaccaatattttccatacccagattcaaaactaagacgtgctgaccagttttagaattggctcccctgctgaaggcctttattttgaaattttcaaacgttttcaaatgctggcaaagctgtgttaaaaaaatggagcagtgaataaacaagtttatcaacctacccgataataccaaactcaacagctgctttatactggaggggaatctccatcagagcggctagagcaaaagctgtttctttctcggagatagttgcattttttgacataattgcagtgaaattaacgaactgcacacaattcagaaacaagttgataaagtgctagatcgtataataaattaaatcacaatgttggatggcattcgaaattaacattcattttgttatcactatacctgaaaattgtcaaattcacgtgctgggagtttgtcatcaaatcttttcatgtcttcccaaggtccatcaccaactccaacaagaattatcgaaagtgggtatgaactgtttaagaatatcataaggttacacattgtaattgcttttcataaaagaaatggcaacacatttcagaataaacacaactccattttctggcattgttagaatccgatgatgaaaatcattagattcaactttacatccacttactgttgatacaggctgactggcatgttagggaacacaaaacaggtaaactcagtgcaataaagttatgaataactgactgtggaggagaacatgaagcaatcattctgcatcctcgatgttctgtgtggactttgagtgtttttcacatacaaatgcaatatcgagctggcatgacacaaacaaataactggataacaatctggttatgacgcaagataatctgtatacttactaggatctaaaagtagattgttgaccccttatgattcatttgatagtttacaagtgattgacatcgcaaaatgggatcacctctcaataaataaagacagtcatcagttgaccaccttctttttatgcatctgccaaagtcatgtacatctctatctaggcaagtcatgtaacaatagcaggtcaagtatagcagtctgtgaagtggaatgtcatggccattctagtggcaatgaaaagtaagtttatcaagcagctgctaatgattagcaaccctattccataaccagcataacaccaaatgtaaatgggctggcacccgaagcgcaccaagaaagtgacagttctaataagaacctaagttcgtcattttaattagatgaaagttatagtatgacactaggatatattttctatgaatgttagtctgagcaagtttaaatgatttgcatttatctgtaaggctcgaccttgcatcgacaattgccttgattgtttgctcttcttgtggactcatttctccatcgcctgtatccacacttcttgtgaccttcacagaaaaagagactgttactttgattccctatgcatccatccatacagaaacaaacacatgcaagcatgcagaaaaggagagagggttttgaattcaaacctggccatctgcaatgatgagcaatacatgatattggcctccacttttttccacaatgtcaattgcagcctcaatcaccggtccatacgaagtcggcccttaaaaccaaaacatatatcggtgaagatttttgtggcttgagaaataagtaaaacacaagaatctttgtagaagtaatgttcaaccatgggtctaattaagaaaactaaggaactgataaaagaccaaattccaacgtcaaataagcaaggaacaaacctgaaagtcgcaagtttggaacaatctttttgtagcatgccaagacttcttcaaaaccatggcaaggtgaatgatcactgtgaaagctaaacacctcttgatcatgagtggtggctgtatagataaaaagaaaaatcaaatcaacagctgagttataaggtgcaaaactagaaacaacattgttagaattcaacttccagggactgaacctaccatcaccaaagccaaaacaaggaattaagttgtcttcatcaaaaggagccatcgtctttccaataatagagatggctttctcatatggattaggtgtgtctccgatggcatgaaggctacgattattgaacgagactttgcctttaaaatgaaaatcaacaattgacatccatgagagacaaaccaattcaaaggaacagaaaacacgaggatataattgaaccattctgctatattattagattgccgcccccttaggtttctaaagattggtttttcgactctgaatacttatttcaacttcatggaagtctcaaaatccaaattcctgaataactgataaagcaaaacacaaattttatggtacaaatcgacgatgtgattagttcacttgcacatacctgtccattcattgcttttagtgaaatcaattccaacaacgagattcgatgattccagtccagcttccctcaaggctgtcgtaacctgtaaaagagggggggagcctgttagtagtagactgcgagaattcaaccgagtagccatatttttatctatactgaagcaacaaacttctgttattgaaattacgcccgttgctagcaaatgatttccatgcataatcaacaaagcaatacctaacgttaacaatttaatgctataacacatgacgagcgtttgcagaaggtttacaaaaagctctgcgtatttgaagttgcaacttgcacctcaccccttgaaccattaactcgactaatggatttttaaaattaaggtatatattggtcaaattaaagaataaaatctgaaatataaatttaagataaaatacaaggaccatattaatttccatcccaatttatttatttaattttggtcaaactgaacagtcgacaaaagcacagcagggtcccgaaacccagtagagttgactcggtcatttgcttctgttaatcaaaacagcagtcgtccacgtggatcacgtgaacacgtttacatttttctttgaatgattttctttttacagataccgatctaaaatgactagaatagtttataaatagattggaattgagtataaataataaggctaaagatgatttttgagcatcaaatctgaaatttattttttcatagttaataaaaaaatacaataattctactgttatatatataatcttaaaaaataaataaaaatattaagaaaatataatcttaatatatttttaattgtaaaacacttttactaaccactttacattatattattgaacacacattgaaacttggttcacgttgaaattgaatccagctcccgttcccaaggtgcaggctttggagaaatctttgtacgaagctcacttaacataagcttattcatataaattaagcgataattaccatgaaaacattgtagaactcgtcgagtcttgagtgtggactcgtgtgagaatcgataacttattgcaagagataaaacttatgatttccattaaatttttaagtttcgatcattgaaaatgaaaatgagttgcagtttttttttaggataaattacaataatttccattaaatttataataataataaaaataataatttaaaatctaaaatatgaagatattataacaaccaccatgagaaacatagaattatgcatgccaaaaatattaaaagcattttaaataaaaggatgaggtttttataatatttatttgaacgtgaggggtgtggggttgtatagggcctgtttggaagttatagttgcggttgattttcaaagtgtctttcatgttgaaatacattaaaataatatttttaaattttataaaatttatatttgaatcagtacatcaaaacaatttaaaatataattttttttaaatttttacaaacgtggatcggcctgcatttctaaatactatctaaatcaaaaaaaaaaattacggtgttagtagttttatgatacttcaagatatttttgtaatttaccttagtttttgtactatattaatattcaaattgaacgtgaatgataaggtgtgagtctcgtgaattttaaacgactgacttctcctataataatagctgtcacgtgtgtttatagaaaaaaaaattgaatgagaaatctgtctgtaaaacattagtagaaaagaaaagaaaaatagatgaaatttgagaataaaacggactattttaattatgtagcctgtttttttataaaaaaaatcactcattcaattattattttttattattaatgtggtgtctaggccaacttacacgtaccttgactaatctcacggattctaaagttaataatcatgtaaatttctaataatactagagtttataaaatttaaactagtaatatttaaagaacaaatctagaaactgattagttaaattatatccctcgagattcagtcagtcaattacttgaaaaccttcaatagtgcctggggtcaccaataatacttatgattgaaaaaacttgcttttctttattatcttatctaactttcacgtttccattgagaagaagacaccgtgttgacgacgtgatgaccaaaaacgcgttagctttattgccagtggttggcaataatggcccctctcttctctcagggaatcatgacatgtggagtgtatactttctttcttgtttcataattgacaatttcaacttcgatttttatgaattcatatcgaatgtttcagtgaatatttgttaggaatttgattaatatttgattaaatgatgttatgaataataagaatttataaaaaaattaattttatatttttataaatttaaaaacacttttaaatcacatataaatataatttcaaatgtaaaaataaactatacatatgattatatctttctttttctttgttttaaaaaattgtattctcaccgtgataatttgaagttgttttgatgatttaggactgtttagaaatgtggttagattattttttttaatgttttattattttaatgtgtttatttaaaaataaaaatatatattattttaatatatttttaaagttatgtttatttttgctttttaaaaaaattaaatttttttattttttatttgttttaaattaatatttttttaatattttcatattattttaatttgttggtgttaaaatattttaaaaaaactaaaaataaattattttaatatattttcaaacaaaaaaaactttaaaaaatcacacttctaaatatcccataaaaaaacacatggaaatcaaaggattaaaaaaaaacatgtttcgtgagtgtctgcgtgtgttccatgaacctgtatatcttaggagtgtttatccttggccgtttggcgccggaaaaaaaagaggttaagattaacgaaaaaaaatcagaaaaataaataacgagttatttttcaatttattaaaaaataacaatatagctatcactttttttaaaaaaaaatttaacatgattgttcttttcagtcctttcaaaaaaattcgctcttatgtggctttgttggatgttatcggtttgaataaaatgacagtattttacaaacaaaatgtcaaataaatacctattttcttcgatttgaaaattttcattggaatagcatttcaaatttcaacttaagtttctaacacttttgaatttttttaaaattgttttaatgtattaatataaaaaataattattaaaaaataaaaaatatattttaatatatttttaataaaaaatactttaaaaaacacagctactttattcctttataatccaagcgggaaaaaaaagaaggaaagttggcgtctggaccacactaacagtactgtcgtgactttgtttaacagaaaaaataaaaaataaaagcaccttgcgatattttgactggtcggatatcacttttccattattattttatctttttccatggaaaattgtaatatttttttagaataagaagcaagtagtatttgaaaagcaaacgaaacggcatggagtggagtggagagtgcgaattgataagaagattcccctgagattccatcagggaaaagtcaaatcagacaaattgactaagatcgcaacggctaaccagacaaattttccgcaagtcatcaagaaattaatatccattctcttatcgaataatatgtgtgtgtgtgtgtagtttgctcaataagtggaaaattatctatcctgaatgaaaattaccagcaaggcttccaagaaaatgaaagaaaataattaaagaggatgattggcacgtacctgttctagggaagaaaaattatcagggatgaaactatatttctgcttgatggattgcttcttctccaatttggaaccaccctttgcttgactggttccctttgcttgactgctagtatcactaccagtggctctagcagtattactcagtgacgatgatggctccttggacat

SEQ ID NO: 44 - DNA, 22 bp, Artificial Sequence
  Primer
caaaaacgcaccctattcttcc

SEQ ID NO: 45 - DNA, 21 bp, Artificial Sequence
  Primer
ccagagtccccttgaacacac

SEQ ID NO: 46 - DNA, 179 bp, Artificial Sequence
  Amplified region for allele A
caaaaacgcaccctattcttccctatttgcatcgcatttgttcttgaatctctttgtattccctgagtctcagagagagagagagagagagagagaaggaaagagagaatgttccataccaagaaaccctcaactatgaattcccatgatagacccatgtgtgttcaaggggactctgg

SEQ ID NO: 47 - DNA, 22 bp, Artificial Sequence
  Primer
gggaaacagatagtgggcagtc

SEQ ID NO: 48 - DNA, 21 bp, Artificial Sequence
  Primer
gcctccttctcctgtaagcac

SEQ ID NO: 49 - DNA, 26 bp, Artificial Sequence
  Primer
accttaacctgcagctcttaccttaa

SEQ ID NO: 50 - DNA, 21 bp, Artificial Sequence
  Primer
tgatgcctccaaaggtttctc

SEQ ID NO: 51 - DNA, 21 bp, Artificial Sequence
  Primer
tcctggcgtgttcatagaggt

SEQ ID NO: 52 - DNA, 30 bp, Artificial Sequence
  Primer
gatgggaagtaaaaattatccgagcaagat

SEQ ID NO: 53 - DNA, 21 bp, Artificial Sequence
  Primer
gtggctcttctccattgctgt

SEQ ID NO: 54 - DNA, 21 bp, Artificial Sequence
  Primer
gtgctttttgctccacctttg

SEQ ID NO: 55 - DNA, 20 bp, Artificial Sequence
  Primer
aatagcaaatatgggggctt

SEQ ID NO: 56 - DNA, 21 bp, Artificial Sequence
  Primer
agaagggatgtgccaaagtga

SEQ ID NO: 57 - DNA, 21 bp, Artificial Sequence
  Primer
acaagctggattggtggaaga

SEQ ID NO: 58 - DNA, 35 bp, Artificial Sequence
  Primer
acttttgatattttctaaccttttctcttattgta

SEQ ID NO: 59 - DNA, 21 bp, Artificial Sequence
  Primer
aaaacaacctccctcccttga

SEQ ID NO: 60 - DNA, 21 bp, Artificial Sequence
  Primer
tctgcaagcccactttttctt

SEQ ID NO: 61 - DNA, 20 bp, Artificial Sequence
  Primer
tttgaggaagacggcaaatg

SEQ ID NO: 62 - DNA, 21 bp, Artificial Sequence
  Primer
caacatattgtggatgcagga

SEQ ID NO: 63 - DNA, 23 bp, Artificial Sequence
  Primer
cagtgatacaatgtctgcaagga

SEQ ID NO: 64 - DNA, 25 bp, Artificial Sequence
  Primer
aggatttcccacagattggtttcac

SEQ ID NO: 65 - DNA, 21 bp, Artificial Sequence
  Primer
ttccttgttttggctttggtg

SEQ ID NO: 66 - DNA, 21 bp, Artificial Sequence
  Primer
ccatcgcctgtatccacactt

SEQ ID NO: 67 - DNA, 24 bp, Artificial Sequence
  Primer
attcagctgtcgaattgattgatt

SEQ ID NO: 68 - DNA, 21 bp, Artificial Sequence
  Primer
tggtgagcgagagtacgtgaa

SEQ ID NO: 69 - DNA, 21 bp, Artificial Sequence
  Primer
aatcttcctggccctcaaaac

SEQ ID NO: 70 - DNA, 18 bp, Artificial Sequence
  Primer
gggtatgctcagcctgcc

SEQ ID NO: 71 - DNA, 21 bp, Artificial Sequence
  Primer
attggaatctcttggggcttt

SEQ ID NO: 72 - DNA, 21 bp, Artificial Sequence
  Primer
cacctgctccataatccctct

SEQ ID NO: 73 - DNA, 28 bp, Artificial Sequence
  Primer
tcattgataactgctattgttccccaga

SEQ ID NO: 74 - DNA, 21 bp, Artificial Sequence
  Primer
cagagacccaaatggactgga

SEQ ID NO: 75 - DNA, 21 bp, Artificial Sequence
  Primer
aacgacctaatcccctggaaa

SEQ ID NO: 76 - DNA, 32 bp, Artificial Sequence
  Primer
tcaatgcatgacggtgttcttgtggtgacagt

SEQ ID NO: 77 - DNA, 196365 bp, Populus sp.
  misc_feature (55204)..(55253): n is a, c, g, or t
  misc_feature (57963)..(58951): n is a, c, g, or t
  misc_feature (60503)..(60552): n is a, c, g, or t
  misc_feature (62956)..(64090): n is a, c, g, or t
  misc_feature (64799)..(164798): n is a, c, g, or t
aaaaatgcaaattctataatgttgaagtgagtgaagttttcgggaaacaaataataaaaaattgtattcaatactgatgttgtaattatacataaagatcactggtgtattgcctagaaatcaaaaattcaaaccaacagaatccttcccgagccaatgttatgttttaaacattccatagacattaaagttacaataagaagggatgtgccaaagtgacgccatcaaaagaaatccacaggcatttttagtgcgatccaggacctctgttccatgataagaaggtaggatcaccaagccgcctgagatgacacagtaaagagaaacagtaagaaaatattaacatatatctcacaaacaatcgaatacacatagcatatgaaaattttatgctgccgactatggggccatgctccacaagtcagagcctcactccatatatgatgctgggcacacttccaaatcctcaccataaaatgcaagccttatgaagggcaattctaacagcctcactctttcaaaagccgtgacgccgcacacttgtgacagcgtgcattttgactttaataaccagtttattaaagtcacgagaactaggctcctaaattcaagaattaatttgtatctatgatcaacttacctaggcttgacaaaatacacaattgtgaaacccattgacaaggcgaagcatatcatcccaacagtgagataagcaatgccaagaaagtcatttcttccaccaatccagcttgtagttgaaagcacaagtttcttcttgccattaaaactgtatgtgttatagttgttacccagtgtaacatttatgacttcttttgcatcaagatccacctctatcttcccatacaactttctaaaagttggcagagctgcagttcgcatccaaaccatgaggtcctcctgatcgctcagctgttacacaaaatcatataagaccaggtcagtcacataccaattacttgaagcaatttgcatagaaagaaacacggagaaaaatttatggttctctagtatattttcacgttttagcaatagaagaggggaaatgacacgcaacaatatctcatcattttaagcatttacaccaagtctctcacgtctccaaggtataagcctaatactcaacaccttgggtttaaaaaatcaactccttcatgaatgaaagaataactgaggtcacatcttcaatactaatcctgaagttgaggttaagcaacctgaaaataccactctaataacacaacagcaacgcagttttgaaatctaccaatgtccagagtgttattaacattattaaagcctctaaaggtattttccaggatgaagttagaacagttatttaattagttatttagttagtgataagatgagttgcttatatattaatttgaagtaatagtaaagggaggcttacacgtgttaatggatcgagccttgcaccacctacaagacctccaccctgaaagtttttaggaaagacatctttaccaaaccttttctccttatcactcttccaagcaattcccttcttattcactgtcaacgactggttcaggcgggagaagctataggtatcattaaacaaactccaagctatcagaccacagggtacaattgcccccctccccgttgcagtatcttctggctcacaagaacttgtatcattctctttactcgcacttttcaactgttcatcacttcggctcttcacatacctgatttattagagcaatcattaaaattatgccaaataatcaccacataaactcaattacatgtgcttcaactttcagtgagtaagcatcccagtttatgatcatgataatcatgacagtttcacactgttcaatagtttttataaaatgatgggttgctttcattattaaacacttgaaagaatgtaattttctaccatcaacaaatagtcaaacacactattctgagatgagaaacatgatattaaccaccaattaagcatgcatagaggagccctttcctcaacgtgtaacaacatcctaggtcctaggctgtaacgtctgtaattcttgaaaatcacaaacatcgccatcttgacttataaaatgtggcaggaaaatctaaaagggtgcacttcctgaaccacatgttataattggttctctggaccatcacctatgatctacataaattacgcgcctggatagtcctgaatatcaatgctcccaatttatatgaacaatatacctctgaccattatgtaaaaatctacacatgattacttgaacccatcagaaattatatgctgatagagtacatgaagttgatgacatacctacgatgattctggtagaagttgtcaagctgatagtaaacataaataggttgcttcatacgcttagggatctggcaagaaaaacaagagttgagaacagaagatcgttatttactgcttaacctcaggtcatgatggctaatttctataattagcataagtcatgttgcatgcgagaaaaagatattggcatgggttttttgtaaggagtagcataaagtaacctactggctactaatacactgctgatatagcaccacttacagctctgacaaaaagggaatgccaccagtgaacagataacaataacatgaaggtatattgtataacagaaaataatattggcatgggtctttccttgttagcttataaatccacaaacactgctaataaagaacatagaaaatgacaacaacacatcaaccataataattgcaagaacaggacttaccgtcattgatattgtgcatgttttatcagcagcgctttgtataaattggacttcattgcctctatttccaaccggaatgcattctgtttcataccgtttaacaacttcaacaacctgataaaaggaggataacccataaaaaaccataggtggaaatataactagaattgcaaggatttaggtgacactagagctcacatctcgggaaccaagcaagcaagcaatgccgatagggatgaagacaatggcaacaagcatgaatgcagacactacctgcacaaagagatatattaggagttaataactttgagcactcatttgcatcagacgaaaccagataaaaagaatgataaaaacttacccatcgtggtgtgagaattggcttgcaagcaggaagttcttgttgagtaaactttgaatctgaaagaaaacgaaacatttttagttccataaaaatcacatgtacacccattacccatatgtgctcgtgtagtgaaaaacaatttgtgagctgtgattgaaacatcagataaagaagctgctcagctgtgctctctctatttttacttttcttgttttttttaacagctacactacaataagattacaagtgcattttaataaaatgaccaaaaatcgcagattttttgctctggcaaatacaatacatccctataaatttaaaatgttttcatccatctatcttgctttgcaggataacaattacgcagtcaggcaactattctgaacactggaaaacattctgttttcaatcttactgtagatcacatgagcatacatgcttagacttagatgcatgtaatgataatacagccaaaattactaaaattcttattcgtgtaatggaaaaatgtccaattatctcatggcatgttatagctgagtttcattaatatcttgtttatcaaacccaatttagttcattttattgctaacaaagtttaatagccgtatttctctttcaaaaggggaatttccaaatatatcttgatgaggaattaaaaaaaccaggtaaggctattccaaaaacggaaagactaaatgatcaatataaagaaaattagattcttaatatgaaacaaaataatcaaaaaagagctcacacgaccactctcatgcaacaaaaccaacagcgaatcaaaataacaagaacccatcaaaaatatgcataaacctccacatggatgcctataaaacccactagtgatcccaaaaacattcaaatacctgagtctctgaaacaaactaagcaagaaaattaggacagggttcaaaactttgcaatttaaaaacacaactaacaccatgatcacaagagggcagacatgaatttgcccaaaatagaaaaaaaaaaaaaaacgagaagtaaagaagagaatcacatttgggtcgctttgaattccttcttggagcaccagaatcacccgatccgttgcctccattactggaggatgccgtgtggctactcatgattgtgttaaaagatgcaagcaagcaagcaagcaaacaaacaaacacttgtagtttctgtctctctttctttctctgaaaaaaacaccaaaacaaccgaagaaagaaaaaccttaacagagaaagagagaaagttcagaaagaaagaaatggtggaaaagactgtgtgatcaaagaaagagatggactttttaaaggctaagcaacagagaggggaaatataaataaataaattttctagagagtcgcagtatatggttgaattgaatctgcaagtttttgtttgacttcagaaactgaagaggatgtttccttattttctctcactagacatgatgagccctcggaaattcctccctttctagaaggtgagtttgtagagagagagggggaagcaaataaaaaaatgatagctttattctagacccttaagattcgaaaatgtttcatgtaggtcctcatcgtcaccaacctaaggttcagaagctttcaatatcatctgtaaataggtattagctggcaatgaacattttcgaagccacgttgagttgagggacttctcaaaaatcgctataattacatataaaaacattgtagggttatatgtaattgaccctttaattgaaaaatccatagaagagggttaaatttatagtttttttcaaaaaaaaaattatgtataatattacagcggctaaattgattaaaaacaaacataccattccttttttaaaaaaatgcaatcaatttatttgatggtgttcagtaggaaagtaattatttttaaagtattttttatctaaattaaaataatatttttaatataaatgtattaaaataattttaaaatattaaaaataattaatttaaagtgagaaaatttattttttaaaaaaatacggtagcactataaaaataaatactacctttctactgtacattattttttttatatctaatttaatttttttaaaaaaaccctttcctcgtttaacttttattttccttctttttttgtgtgtatttttttttttaagaatcttgacatgatattacttagatccaaattttcaatggatcataaaatcaaaataaactcaactagattattttgtttgtagtttgattttttttagtgttttgagatctcatttaatttttctaaataatttaaaaaacaattaaaataacgaactgtaagtttaagttttttaattgactatagtgagaataattggtgactgatttttttttaggacttcgtggttgttgttttggaggtttttatgagtggaaaaaagcttcttattctgatgggactagaaaaatctcagctcgtcggaaatggcacaggaaaaatcttcactgctatctgttaattattactattaatcataactttttagactttaattttcagattgaaaggtcaaattccacccggatagtgcacagagtggaaagcacggtgccttgctggacgggctttgtgggaattcgggatgaccatggacagcacactagtagagtcgtataataactaaatattattaatatagtatattgatgttttacacgttcaatttttccatccagattaaaatgccaattgtttaattctttcttttttgctaaaacaattatttacttattagagttgtataataactaagtattattaatatagcataatattattttaaaaaaaattctgttgagtgttaggccctcacgaatgaagttttctaaaaaaaattaaaaaaatttattgttttgatatactaatcaaaaataatttttttaaaataaaaaatactattttaatatatttttaagctaaaaatatttttaaaaacaaataatatttttatatttttatcaacgatggtactgtttttttttcgttttctatggcctccagggttgaacttgaacgtttccaggatcatagagaagtccactcatagtttgaataatcttctacaacggcatgtaataagatatatttttattattatatattccacgcgatatgttcagctggctgctttccaaagccctgtttctttgttagctacgaaaaaaaaatattgatatttagacaaaattaaacaaactagtaatgtccacatgcactgggatttaaataataggtatttgttaggtcattgttttcactacagtgacgtttaatcgcccgcgcgagctgcttaatattgtaatggaattagtagtgtaaatgcgagttatttattaagctgtgctttcaatctaacgatgaagaaaaactcattcaatataagaattttaggtttgaatctcgccactgtattctaaaaattataatatgtatgctcagttaatagccgtaacgttccatctgaagtttttaaaaattttgatttttttattttaaataattttttatgtttttcttttgttattttgatgtgtcgttgttgataatcaactttaaaaaataaaaaaataaaaaatttattttgatatatttacacacaaataatattttaaaaaataattgttattatcatttcaaacacgtagcgtattgtaatttattgggattgaatttttatatcgtgaaggagttcttccggtaaaccagatctgataacgcaacaaatttaaaacctttgcaagtttcttttaacaaattataagattttattgttgttgttgttattggtcatttacaagagaattttatccattaaagtcggccagcatatgtttgcagtcaagcgattgaaactttataataaaacacacacgtgaagtttggcgatggccgcccttcataaatttacaaagacgagagagggatgcagctagcaagcccgtattgaattacaacttgcaatccgagctgtagccacttttagatgccaaaatactggaggcaatcgacgccccctgggaggaattacctccactgttctagctgggttatctaatttcaaagtaattaaaatcaaaatctgtagtcaaaatatatttgcctctgttattaacattaatttcattttcttgtatcaggtaatgaatgaattcgtaacctatcactgcttatccacccacaaatatacacatcacgagctccaaattccagtgtgtttcgaatcctcgttagaaaaagtcaagcgatgccgtaaatactctcgatggtcctgcttatttatttcttactcgatctctcatctcatcgcatgttactagaggaaattaatagcctccatgcacagtttggtacgtcaatgccgatgattgtcaacgccatcgtgggcagtatcatcatggaattctgttgcattctattatatcatttattaaaaaatattattttaatatatttctaaataaaaaatacttttaaaaataataattctttccacacggtgaattaatatttttaattcagagaaatatcgcgtcgattttgccaatccctccattgcagactcggaatgctagagtcgcccggtgaaattaaaagaccaattatcttgactgttaataggaattttattggagaaatttccatgttagtcaaacatctatgtgcggaagaccacgttatgttcatatagatgaactatacgtggagcacagagtcaaaaggattttccatccgttgggaaatagctacgattaacattagaccaggagagaataataaactgggttaattaaatatacttaaaagagggtgaaaaaaatcatcctcgccatacaatcatgcctgtgatcacatgaaagtcacggtcatccattaattccactgtcagtgccaccattgttgccatcaatcggttgcttacataccaatagagaggcctgcgttgatttgcccagattgtttttatttgctatcggggttgatttgttagacgaagcctgcgttgccgagtatatttagagtgactgtggctgttgatgatcatttgcatgaattaatatacagaagttgataaattcgtgagcaattataacttcttttaatcagatccatttattgaactcaatatatctgatatacgccatttaccatgtatgattattttcaggtttttgtatgtatatatattttttatgagctaactattaatagttattctattagaatattagtaggttatttatcttcgttaaaaaaatattcaagcattatcaacgtgattttaaaaataaaaaaaaattatatagagattgatctaatataacttagtcaacttgaaaaaaaaaacataatttaattgaaaaaaactttaaagtgatatcttttaaaaaaaatattaagatttgaatcggcttaagtcaacccatgtgaacatgtaaaatctatgattcgaatcatgagatcgtaataatatcatgaagagcaaattaaaaaaaaaacatattgaaatacaattcttaatcaactcaatgttgaataatgaaattaaaaaaaaaattaattaaaaaataacaaaaaaatctgagtcaactcaagttaacctgtatcatgagaccaaaataacctaataaaaaacaaatcaaaacaaattataaaattcaattctcaatcaatctatgttgaaaaatgtagttgaataaaaaacaattaaaaaaacaaaaaaaacctaagtcaatctagtttaactcaccaaatccttgactcgggtcataacaccatgataacctcatgaaaaacaatcaaaaaataagtatgaagcttaatttcctatcaattcaaataataaatgatgagattgaaaaaaaattatattacaaaaaataaaaataaaaactcgagtcaattgctttaactcacaaaacttataattatattaaaataacattataaaaaataaattgaagtaatgaagatcaatcactaatatctataatattaaaaaaaaattataattcatgaggaagaggactgtaatttcccttcttcaatcatctctaggtgattaaaataatttttcaattttatccatacttcttatgtgtcaagatttccttcgcgcaaacagatgatttgtctccaaaaatcccgcagttgcagcatttgccagattgcggttcggtgaatttataataaagaatcaagcacaactccattgacagcatttgccagattgcgggtcggagaagttaataaagaatcaagcacaactccattgacagcatttgccagattgcgggtcggagaagttaataaagaatcaagcacaactccattgaccgtctttcatagacatgatttggtattttgctctgaaccaattacgagtctaataattatatgcttggataaaggaagggacgagtggtttgatacatggtgtctcgttttctctatctcaacggtcccttcagtatgtatgggaaaaaaagcagatcattttatttttcctttttaaaaacagctgtttccttgatttgacgtggtctctctcctgtcttgaaattaatataattgagggtgattagtagtgttacctgaaaaaaaaaaaacctttctctaatctctacgatgaacacgaagctttcttctgccatgaaacttgatagatgtttttgagccaagcaaattatgctttatatgaagtttttgatcacttggattctattcctgttgtctcagctgtgcgtgcaataactatttgttctgatctagaaatcatgcaactgttaatgagaattacactgcctccattcattcattaattgcaatttctgtgattaacagaacaggctgttataagaggaaaatatggcgaacaaggatgcaatgttggcgaagatggtggtttttctccgaacacatatgatgcttaaccttgtctttgaaaattccgtgacctctccccatctgcaaatcaccctccaaaaataaatctccgaggatatgagtgacaggagaatgaaaatagatgcacagctgatagacaactactgtatcttttctccaggatagctataatctgctgtgtccgcccccttaaagagagctatgtatattcaaaattcatgcgaggttcttgtttaatcatatccattggcagtttccaagaaggcttggatctagttaaagaggccatcaacagaacaaggtacaacgagagaataaagatgaccactgatccatggtgtcgtcgcctagcggtgataaagttagctgagcacgtttttaagttcagaatccattctgggatacttacttttggaccccatttatgattcgatttgcagagcagttctaaatttatttattttcttatttttcatatctttgttaataattttggatctcaagttgattttattttctggtatggcctttgatgaaaaaggacaaactatttatactatttgtacgtaatttttttggccattattattaaaaaaatcagaaatctagtctcgagagttttcttatagttctactctgttttctttttgaagattttaaagtacaaacaaatcccatgttcttcattgtacgcagacacgtcgtaacattgttgaagctcttaacatcatccagattaccatagttagggcatctcaagcaaagatgatattttaaagtgatattttaaataatataaatatattttttattattatatatattttaatagaaaaaagctatttaaaaagctaattgtataaaaattaaaaaaaaaatactttattttttaatgaatttgatgtttaatgtcatctttttttatatggctgcatttaattgggtttttttttttgttggtctttttttttatttttttaaaagacatgtaagaatatattttttgaagagaaaatgcattttctcattttatttattagcactcctttagagcacatgtaagacaattatgaaaaaaccaaattaatatatctttatttttttattttcatttatcacaacccatggaattgctcttactggccacgatagcaatacctacccactctcctttctatgcaaaggatacgtcataattactaatttttacctcatccattgctggggttccaaagctaaaaggtggattaattcttgtgatttgtgttaaaaagaaaaagaaaaatatattgtcgaatactttatcgtggtagtattttgggaccccaaaatttaatgtttctctctcgactatttccaagaagttttgtctttatcttcaaccaattaccacttcgtgcgcgataatggcgacttgtgcaccaacacttttttctaaaaagtttaattttattttctgattatcttttattcataaaaatcaaatttctcatcgaggaaatcttaagcgtgttgttcacactgctgtgtgtgtgtgtgtgtgtgtatcatacaatttctattttttttttgtacagagcaattagacttgtactcttgtgtgtatccaggggcggaaccagggaaggcaagcaggcccgatccctataaaatattttaaattttttttttatttaatattttattatttaaataaataaattttttaataatatatattattatattaattttagccttccctgtaaaataaacctagctacgcccctgtgtgtatcgattgaactttttctttcacactacaatcagaatattaaaacacgcatcaagtcgtccaacagtcattgattctaaaaaaagaaacgaagaaattgtcctgtaatttcgatcgagaattggaaagttcttgctcatgtaccaaatggagtgcaccctccatattttgccggagtggccgaaccagccatccattaatggctaagtgccttgagagagacacgattttcactttatatagcatcagtactcgtgtggataatacgctcttcatttcttactgcccaactcttgttatgtaattctgcgttgcgtgttatagtttctttgacctgaataacagtattcttgtggatttccctagacaaaagcaatagtgattaacaatagggtgttacagtctaattatattttaaaaacatttaaatttttataggttttggatcattttgatgcactgattttaaaaaataattttaaaaaattaaaaaaatatcattttaatatattttaacataaaaaatatttttaaaaacaactattatcaccctcccaatttaaacttaatccagcccgccatttctaggctgcttcaatgtacaccgggccttgattttatcgagctttgaatggtcaagaacaaagggtggagccattgattgaaattagctccgaagacatgcggttcatgaacaagacaggaccgatttaataattttcataactaattcattgtctgataggcattgtagtgtttgtgctttcaagacaaagtgaacctattatgaattatgattgtaaaaataataaaagattcaaggtgaaaacattatttatatgaataataaactatttttttaatatatttttttattggaattttttcgtcgaatccttttactttttatctaacaatcttagtttggttttacagaatatatactcggtaaactatgaagtagtgttttaattgtgaatggtgaactatctcaaactttttaatttattataatttattagtatatataattttggtttattttttaaaaaagcacatgaaaactttttaatttaccattgaagttttattaacagtaaaacagaaaccatagcaaacatttacaccacttttttgcgttgaaaaaaaaaaaaccccaccattgcattaggaataaagaggtgtttgggggtgtagtaatattattttttcaaggtattttttctataaaatatatttttaaatttttaaaaattatttctaatatcaatatattaaaataatttggaaacaaaaaaaattaatttgagacaaggaaaaacaattaatttttttcaaaaatatttttaaaatacagaaagaaataaagctaatatcattgataatatctaagatttttattgaaaccgcgtgtgtgtgtaatagagtaaattatagattagtttctctaattttgaaaaataaattaaatagctcttctagatttagaaactagctcattagtctgtttgttttaaaatatatttgtaaattaatttttcatgcatttcatgttttttatttttttataatttaaaaaacaactagctaatacggaaagattaacgagaaaataagattttatttacaattaagtaacattaaattaagaatcatcaacaccggttaggagtctagttaattaaaactaaattaatatttaattaattcttcaaagctagaagcctagaaaaactagtttatgatattcatttaatttatccctttcaacttaataactactcctatatatatataacacataagtagcacgtgggattaataaattatttattagtatgaacattttaatcatcaaataaaaaaatattgataacatatacttattaaaatatttttagtacgttaaaggctcgcaacagcaccgattcacgataatatttttagtatggctatttatttttagacccgcgcagtgtttatcattacatttttttaaaaaaaatcaggatttgactgcacacgcaaactttgttcactgtggattgaaggtgaaatgacgagtttgccatttaaaaataaaattatttgaagtcaatacaatatttttacattattcattaattattgccagattaatcgagtacatcttaatcttttcatatttttcaagcaatgtaaaatgactatatttctgttgcaagcaaaatatattcagttcgtttgtaagagttttttcatgcttttacttttttaaaagcatgataaaataattaaattattcttgtgaaagtaaaaattttctaactagtgtctacgttttttttttttgttttttttttcacttttgagttttagttatatttgatttaactatgaggtaatttgatatattaataaatataaaatataatttaaaaataaaacaggcttgtgtgtgcgtttaaattatccttacaaacaaaaaatctctaactagtgtccatggtgtttttgtattttcactttaaattttaactatatttaatttaactatgagatactttgatattttaataaatataaaatataattaaaaaaacaggtttgtgcgtgtgctagtaggtgggctacaatcaagcttttcaaaagatacacgaggcatttcataacaaccaaagactaccttccacaacaatattgaaaacatcttaacgactctctattcttaggcatatatacgtggcttaatgatctttgttttagcgctaacaaccttttttttatttattattctctaattttttctttgaattccatgcagagccctcctaattttacagacaacccttcaaattgtttttttttttttttttgtatttggtcccaattattttaattaccatgtgttttatttaaaatgatttagatttagaattattttcaatttcgtcctctattttcttcatattatggtctccatcatttgattgttgtttgtttattttatatatttttaaaaattaatttattttatgttttgatattccattttttatattagttttgattctaattctcttgagtgtttttttaactttaataatttttttaaattgattttatttttgattttatcattcaatattaaattagtcgagaattgagttttttggttgagttcgggtttaggatctcatgggtcacgacatgaaagattaacatggtttaagagatttgtttgagttttgttgtttttttatttttcaagtttttattttttttagttttatcatttaacatttatttaactaaagactgggctccattattattttttatttgttttttacaggttttttcactaattttaaaaaaggtttggttatctcatgtcgagtctttttatttattattttttgttaaatctagcccttttttttataagaaatcttgtttttaattaaattaattaattagatataaacattaaatatctacttcatgatattttatctaatttgctttataaatcattactctaacaatatatacaatatccaatatctctcaatgttattgtgtagatttttgttgtggcatcataattgtttgagctatttttaatgatagggtgatatcgacgacaaagcgataataagtttttatttttttctgtatgatatttactgtttatttttctgttaattttttttaattatattattaaattagaatatcttgaaattatactatttatttaattttgcctgaactttttttttctcttcaatttagaaaaaatctgtaactgtacgtggcgaagcgcgtgcacatccaaataggctccaaactagcacttcccttctcattataagtgtcagcagccccctctactgtgaatcgcttgtggctacaaggaaggaaatcattgaaaaagacgaggaaaaaatgacgttagggagaatagctctggcacgcatcccggcgactaggtgcaaaatacacagtctcttctctgctccacactcgtcttcttccacgaatcgcacctctcctccactatctcgccacgtaaccgctactcatcttcttttacttgcgcataagcatcaatagctttcatccttgtgttgctaattgaatacagcgatcgcgattttgaattatctaaattttgtttaattcatgttttaatcgcttagaaataagtagtattttagtaattactggttcaattgataaataatttgtttcattaatgttcaatgtaagtataatctctgtttgaatgtatttttgttttctggtattgttagttgcgaattcagctaggtttaaaatttgttaatgtttttatggcagatgagcatgaagagtgaaaatctggtttcgaagctaactagttctggtctattaaagacccagggtcttatcgatggaaaatgggttgatgcaaatgatggtgacactattaaggtctgccattattgtgcgtgtgtttgtttgtaattttgctctactgcggctactagttttgggtattgtttctttctttgtcacacaagacatcacatgtatgtgttcttttcatggaatgacaggttctcaatccggccacgggtgaagttgtagctattgtcccatgcatgggccagagcgagacgaataatgctatatcatctgcctatgatgcatttagatgtaagaaacttcacactgaaccaacctaacgttcagtaaaatgtatttatgctagttaaccttctcctactggcgctatcatttcctaagttttgaattttgttagaggaatatggtttattttgcatgcgaggattatctttcagtagtaatagggggaattgctagtagaggattggtcatggaagtgcagttattgctgtgctgtctttgtaggttagaatccatgctttcagaaggtaatggcacttggatgtctcttttacagtatgtcaaccttattactgaattggagagcatatatacgtttttttctgaactcatgtgacaccatcttggttattcctttcaaagagtttggatttcatgacaattgggtgaagtcttattttactacatcaatccactattattcttttcaattgacctgcaactcgcacctgctttatagcccgcaccacgtaactaactgctacaatacattaaatacttcaactcatactcaaacgcttgtggtatttatgataataatcactgtaaacatgcagtggtgcacactcttgaaatattacttccaagcttctatgtgttgcatttttattcctcttatcctagcttttcgcagcacaatttgttggtaatttactgtcctacagatcattattttagctgtctcttcgagagttatgtggtactctagaagcaaagagtgaatggaatggattaaatcgagtaccaatctagtttttatgacttacaagttgatatgcccttcaaagacttacatagacctttgcatagatacaatcttaataggatctactcatctgacttaaaatatggaaatctcttgttttttaccataagcttgctaaactcctcattgtttatatggatttttcttgtttagctgtaatactagcatattttgatggcccttttctgatatagcttgacattgttttttttttttttgatttatatcttttgctttactggacttcaaatgatattgaatttttttttaaaaattcttgctgatggttgcaacatgttcattgtcttttatttggccagcatggagtaaactcactgcttctgagaggagccaacgtatacgaaaatggtatttaacccttccaatacgatcttattaaattatctgtgttgtgaatgtaaatacttccaaattaatcaaatagttgaaaataactgtgttgtattggtagagtattatggttctctacactgaatctcatatgattctttccacctgtattgtaaggtatgacctactaattgctcacaaggaagagctgggacaattaataaccttggagcaagggaaacctctgaaagaggccatgggtgaggtatctcatctcaactttgctttcggaaattaagagataagcgttaaccctacattgtgttactggtcattgtcaagcaacatgtgatccaagtctctaataacaggttagctatggagctagttttattgagttctacgcagaggaggcgaaacgtgtatatggagatataattccagcgactcttggtgatcgtcggttatttgttctaaagcaggtggctataactgtttgtgatatatgaaatcctgtttaattgcaaatacgagtaaattagttcttccgacagcctggctactcctatagacctcgataatttgcccttggtttgggtctctttacaaggccttttcaaattgtgttttaatttctggcaccagcatgtatgtttaatgcaccaatatttgttaaaaccacataaaactcatgatttttaggaattaaaatcctcgggttcaatatctatgagaagaacagggcccgagatcttgggacacattccttgcatgaactgtgttttagtcaactttatcctggtagcggtccagaaatctgtttcttaatgatctatcttgatgaatagttcttgtcacaacttttcttctttgagctgtttgcatggctttgataatttcccagcgttgcttgtttctgtgcaatccatttattcagctatttatccagcaatcttcatgagtttttgcagcctgtaggtgttgttggggcaattacaccctggaactttccattggcaatgattactagaaaggtgtgttcattttagaatgattctgtgcaaagaaagttaaccttttctggtgcatgagtttgttgttgaagaataacatacttttttcctcacttgcataggttggtcctgctcttgcttgtggttgtacagttgttttaaaaccctctgaactcacacctctcacagctttagcagcagctgagttggcccttcaagctggaataccaccagtgagtctcaaactttttacgtgcacagtggaagtttcttaattatttaggccgtgtaagatgcaagtgcttggatataatgtggccttggttgtctttgtaaattgtgtcctgttagacattgatgataaagttgatactttatggttgtttcaatgagaaagacttatcctctgcgatgcaatgaagtttttggagtaagttttggttggaaactaggatacttgtaatgttttattatagtctcagcatccaaaaatattctattatctggttgtgcaagaagaagctgcagcaagctaacatttagaatatttactaaagagtgcttaaaaagtaaggagggatgggaatgtaacataataaaatccaagtatcatcccatgggtattagatgtttatcacaagattccaactaagcaaagtactgaagaaaaatgcccttgctgactgttaaattgagtgactttgtgttgcaggaacacctactgaagaaccacaattgacaaatagagtgaaatgctcttttgtattttatatctcatcatacctgtgttatgattgctaacctatgctaataatcagttgagcatccttaccgagcaatgaaacagaaaatacccatcactggcaatctttttagctccgttctggtttagcatgtccttgcatcaccggacaacagcaggatctggtctatcgtcctgatcaaactgctttctgctttgaatgacataatgatggaatgaatgaagctttttctggtctgcttttgtagatgcatgtcatacacaattgatgtgttatattagctaatatgagttcaaatttgttggaattctgttcatttgtttttaatggttttaatttcaatatttcagggtgttctgaatgtggttatggggaaagctcctgatattggtgatgctttactagcaagtcatgaggttttacacccttcctctatttccttaaaccaaccttctcttctctttgacaacatggcattgtcctggccagagtagttggatattcaaatgacataatgttgatattcttgctttatacatctgattcaggtaagaaaaatcactttcacaggatcaacagctgtgggaaagaagttgatggctggtgctgctggaacagttaaaagggtatgcattggatgcaaaatgaatcaatgtgatgatgtttcagaaatcatcttatggctaattgtcttttcccttaatctttctagttatctctggaacttggcggcaatgcaccctgcatagtatttgatgatgcagacctagatgtggcagttaaaggatcagtaagttagaggggttccctgtgcatgtttattttgattgtggtattgtcatggatatttctgagtgccatttaataatgtttactttacatgtttagacatatcagatggacacactaagcttcctatctgactggaatggattttggtgccgagggttgttaattgttggttagacatgggggtccatgtctccatttttggaagtgaaccttttgtgtgaattgcattggtgaagccatttgatttactgatttcaggacagcctattactgcagaggctttgattcaggattttgaaaatgtgcttttgttttgcattcattattgggaggtattgtcatggtggtggtaatcttatcaaatcatttcatatcattgcagcttgcagcgaagttccgtaatagtggacaaacatgtgtttgtgcaaacagaataattgtgcaagagggtatccaactacagaattacagccctgattttaccccttaattctaattttatatgtaatatgcagccattttgatttgtgatatattgcacctttatgtgcaggtatctacgacaaatttgcagattctttttcaaaagctgttcagagtatgcaagttggggatggctttagcgaaggtgtgacgcaggtaggggttgcatttttttttttaaaatatttcgtaattgttcccttgttgaataataatttgtgcaaagctagtcaggtattctatgtttcctagatttagcagtttctagggatgatagcatttcaatggttggtgacacatgctagactgctttatcatctttattgctccctatctcgttgagtttgtccaccttttcattttgagttgtcctaaaattattgccgactatgaaaagtcaaaattattaaccatttggtcttcttgctatatccttaattttactcattttattttatttttaattcaactactttctccctcgtaaaactagatttaaataaaactctttatttcttgagtttttcaaacacaattcttattaattgagggagtaaatatatcaatgaatttacaatgaaaaattgtcttaattgtactatttatttagattataatatgtgatttagcaagaaaataatgcccacacatgctaaaaaagttgtgattaatatacttaaaaaaattgttctttctttgtagtttcaaaccttgatcaactactttgcacattaaacctctcaccactagcccaaccaccttgatatgattggttctggaatataataaaagggtaatactagaaagtgatgaaggaatggataaacatgtcatcccattaattgttccttcttaatctttgtgaaagtcgaagggtactagactttgggtaatagggagtctgtaatttgtttggatgaagatattctaatcacacattcatgcagagatgtagtttgttgtgtttatacatctagaaccttttattagctactttcatgagatttgaagtgaacagatcatggtgataactattagtttcctcacagggtccattaattaatgaagctgcagtccagaaggttagttgcattttatacatacaattggccagccatcttgcttgtgataatcctttttaattaatgagatttgttgtcaattggtccctttgtgatttgggtttcaggttgaatcatttgttcaagatgccatctttaaggtttgccttttctgctttatcttattcaatgtactaggttgaataaaacttcatgcattatattgtctttacatcttccaatatttcctcttcctccccgcaatacactcgacctatgatagcattatatttttatgaccaagggagaaaacttttggaggttggagtaaacttttgtatgttttggtgaaacctagaagtatttgtaatattttcaacgccaaaaaattctataatgcaattaggttacttcgacattctgtttctttgttccctcgcacttcattatatgaaaagctgaagccaaataatagacttggttacagtaattaagtttcactggcataattgttcttcaattatttgttctgtatatatctcatttctaattaaccaaaattgtacttgaagggagcaaaagtcctccttgggggaaaaaggcatagccttggaatgaatttctatgaaccaaccataattagcaatgtcactgaagcaatgcttctatcgaggtaaatacatgaagataatttattcattctgcaattctcagctgtataattaaagatgtccatcagctttcttacaacaggtaaaaggatagtggctgttgttctctgccacttgctgatgggtatacattcttaccttcagtgcggctggttgaaacatgcagccatgctaaaaactaacaggccaacctttaggttttggcatctaatcatggacactcatggtggttttgttttttagctctttcttaaccatggcatgtaaaattcaattgcaaacttaaggttaatgttcttagacaaaccaaaattgaggtcttgtttattgatcggggactaatccaggttcgcagtagatgacaaaattgaaggctccttaggaaatgttgcatccacaaatactgccttttaatcaaatgaagttgaaggactggccattgctttcagttcttttatgtgattttggagttggtacttcataattaacttgctgcaaattcattttcaaattatagaactttcttattaatcagagcttagctcgaagagttaatggatatgtgtaggtttataatggagcacggtgtggtttgcattttcatttttgctctttgaagtattttggtttgcacattgttgatatcagtagcgttagcttttggtttgttaaatgcggcatcattgatttgtttacattaacataattttaatccatgtcattgaagttccttaacattacctataggtttatactcattcaggatgttaatatgctctcctctgccttgtttcagggaggaagtatttggcccagtggcacctctgttgcggttcaaaactgaggaagaagccatcttgatggctaataacacaaaagcaggttctttcgtctgcctttacatgcatacatgtacacgtatttatctttttgtttcctcattgctatcattttaaatatcaattatctgagagtattacagatgaaagtttgtaatatactccttaacccagtttcattttccatactattgtctttatctattgtcatggtaaacagacttatggtcaactgtaatacaggattctagcttatcttttctggtaaacgatgcagggttagctgcatatattttcacaaacaatgttcaacgttcatggcgtgtcactgaagctcttgagtatggacttgttggtgtcaatgaaggacttatttcaacagaggtgggacttatcctgtgttccccattggaaaccatagattggcttcttaaaacttaaaaaatgtctgttgctaaacaggtagctccatttggaggagttaaacaatctggtcttggacgggaaggctccaagtatggaatggatgaatatctggaggtaaagattacttttaatgcatcttaggaaaaagtgaaagctatcttctctccctctcgctcccatgtttaagaacacaaattgggtattctaatcttctagcttgcttttaggactgcattgtttatcaacttaatcacacacatacagatctacatttctttattctttctatttgagggttttcaacctgtatttatgtgtgagggagatgatttactaattaccctggttttcaattccctaaggatcaagttcttggtttattttgcacctcttttagacctttactatcatcataacgaggtattcttgcatgccgtgcagatgaaatatgtctgcttaggcgatatgaacagaaaatgaggttcaaggtttgtatatatcatcaattgcctgttatatttggaatctggttgctcccattaaacttaaattttcagataaaatgcttgttgttcggtttattcaggcaattaaagcggctcataatctgaaggtagctggattttggggagagtgtgcagtctcgactttctgaatcttaagcgtagaagatgaccagcaaacagggcatcacaacatgtgtacgtaaataaatgcaagtttgcaccatttcccagataaattaataacgtatcttgctgctgtctgttctaattctaaaccctttcatcgagatagttttctttttccttgcttctgggtaatacttgtgatcctttttatgcgcaaatggttaattgccttctcttttcttctgttagtgttttctttgttagtataattaatgagaagaaagccttagcacaccggcctagcaatcttgcttctctatttgcactggagaaaggaagatacaaggcaggcagatgtgaaaatctgccatgtcttccttgtgtatctggtgtaaatattactgatataatcatacgttggaaattacgaggcaacaactcctttgtatgagtatatgctgctgtcgtttctaatataaagataaattaatgttttttctatctaaaaaaaaaaaggaccgcctatttattgtttttttttagctattgaactaaggtttcaatttcgtccaagaaaattaagatttcatttttattaataaaactaaaaaaattaatacaaacaattcaaactttccagttcctaaacttttgtttttttttttcattttgtacacaaaagtcatctcaattaatcaagaaataataggattgatctgtcttcaaattgaaaatgcatgtgccaagattactaggtggtgtttgagaatctgcgctttagaaagtgcttttgatgttaaagtaaaataaagggcatcatcatcaaattctaatatcaatagaaccaaaagaaaattacttaattttgaggggaagcgatttttttcaaattatattaggaagtacaatcgaaataaaaaaaaaaagcccgtttcgaagctttattcgttacaatattgtctgagcagctttagaaatgattattgttatattttttaaaacactgctaaccacgtagaaaacatagtcgcccagtccgcatcatcttcacttaaaaatcataaaaccctccttaattattcccctctctaattataatccatctaataatgctacagtactgtatagttatacaaaatccaatagtggaaatgttattatctaggctagctataggaatattttagctttagcacatcgtaaagtaaaaggtaaaatcgagtatcaaaatgagagaaaggcggggaaatctaagttgtgtagacggtctgatatcttgtattccaaacaaaaggtgtttcgccaatggaatgtcatatattccatattttatgtagctttgcaagatcctcttctgccaacttacttaccggtcctttatcttctatatatttttagataaatccttttatcttcttcatcatcgctgtatatatatagctgaacctctgagcacatttcaagagaacaggtctatttattaatatttagcagttgatttcttgttcgcaggatgcaacggagcagtctcatacttgttcatagtatccacctgttcttgatgaaatggagagactcattctggagattttatggagagtttagaattattttttttggtgaattcgattcatgagtttacaaatcatttgtggaccatttttcttaattattattttagtcatagagaatgaaacatcccatcaattcactagggcgagcaggatagaaaagacactattctaaagtattataagcgtacataaagatgggtccctcaaattcaccttcaaaggaatatattcattttagagaatatattcatcttaaagatgcttgaaattcaagctagcatgcccttaaaatcaagccaaccattttcccactggattagaggcttcaaatataatgaactaaaagttagaccttagctttgcttggttatattataaaggcacaaatagtgagctaatgtgttagtccaaaaagctaggaatcttcaaatctaaatgaaatgtcatcttccacatatggatagatcagagccaaaatacaaagcaatttcatggtaattaattaattaattattgccaagtgtggtggggggctggccattatatatggccatatataccacctgcacttcaatggtgacccaaaccagcttgttttccacttggtttacatgcataattggcttgctttggacggttaacatataattaactcgtatggcttccagaaagaaaaaaagaaaaagaaaaaaacatttgagattttaactcttcatggatatgaacttgaagaaacgtactcttcatagaaacacaagtctttgagcgtgagattgtttttttggtgggagaggatcgaatcttcctttgattgtcaaagacgaaagcatttattcccatttgttagatttcagttgatagcttccatttcccttttttagatctctcaagacttgctttccatacgagggaacgcgctaatttgctttgttttaaaatactgagtgattgactttgccacgagttggatcgacgtttcaaatttctggagtctaattgcttaattaattgttactaaacccagttaacaacaacaaatctagtatatttggttttgaatatgtttgaacatggactcctcccttttgttgatgatcatctcaattatttacgagtgatgaaatcttcaattcatatcgagagatgagatctgtgagtgtgaaagtttttcttttccttttcaaaacgaacacggaaacaagataagaaaatgctaccaagctttgtgccaattccaaacccgatgtacacacacacacacacactgtttttggcatttcatcaaataaattttttgaatgattgatgattttttaaaataaatttaattaatattaaatttgtcattgtttttttaatatttaagtgtgtcaggacttaaagttcaatattcatagacttaatatttagttttactatgtattaattcttatatgttatattatatttataaaaatacatatttaaattaactgagaaatctgttccaaatctagtaggaaaaaaaaactttttttttcccagctttcccctggaaattttaaaatgctcaatagggtaaaaacacattcgtacatatcaagattaataaaaatatatttgtatattctcccacttatttctctcttcttcttcttatatttatttatttattattaagtaaatattaacaattaattataaccgaataccacaaatattttccttttcccacccctaatctgatttaattactatacttctttaccatgcgcgcgtggggcccagtgtcaatttgttggctttgaccctattagggttcttttgtttgttatggcttggatgaaatgcatgccaggacaatctttaattccagaagatgagcccagcagcaaagctttagaggaagagaggtccccaaatcctgtcatcaaaagctccatactcgaaaccctagctttatgcattgatgttcacgtcctcggtaccagccacaggagagctcctaaaaggtggttcaaccttgtctatttgttcggtgcttttctcatctctaataaaaactacatttatcccccactatgtttaaatccaagatgcattgttgaatctcgtttggtatcattgcatgccttttttttgttaaaattttgaaaataaaaaaataatggtaaagaactaacactacttggacaaaaaaaaaaaaagaaggtaaaacttagcatggctgatgaaaaatcttgaaaacactagttttttaaaaattgaaaataaaaacgaagaacaaaaaataatttgttttcaaaaaggcaacaatacctaagtttttttttttgaaaaaagataccatagtttttaaagttagaggacttgcttaaataaggatgataatttaatctgaaccagataaataccgacccgatccaaatgagtgaatattttctggatagttaccttacctgatatgtaatgagtagggtataatattatattgtcaaacttgacccgaaatcagccctaacttaatctgaaatatatatttatattatatagatatatttgtagaacaactagatttttttaaatacaatatgatatatacatatctcaacttgatataaaacatacatatatgtataatatttattattttttcatttaacatacacacactttaaatatatatattaactattttattttttattgaataataaacaatattcagataattaatattcttatgaatacccaaaactcgataaataacttataaatatttaatttttttatctaataaataataagtaaagaatagatatcaagaaattctacttgcaaatatccattgccacaactgcctttaaatatgtttttgtttttgtacaagtataattataatgtaactccaatactgaaagcaaatctacaatgatacaaaaatcttctccacagatcatataaaacttaatcaccacatggagtgatgttcttaagagctaattaattgtgttgatctaaaagagtttaaagtaaattaaggatatcgcgggcttaactattttaaaaaataaacaagagttatttttcatgcggggcacgtcgttcctaatctttatcagttattcactgtacgtacttaagaccagaaaaagtactaagaactggatacagtagtactgataattgcatggagacacgtgtgaagatttcgtcatcatcgacgatggtcgtacttctatagatcaaagatattccaacaattatcgtggagggatcggctggcttgttgaggattttgcttcctttttttagcatttagaattcaaatctatcaaaattttcacgaggatgtatgcatagatattgtaaaatagaatttaatttcaatatatgcaaattaattgatataaaaatatatatattttaaaagaaaagaaaagaaaaaaactctgaatgaacaatgataccccacggtattgtgaaagtactctatgtgcacaaaagaggtttagaaaagaaatgtcaagataattattattacaaacatatcaatcagttcttttagtaggccaaagagatctagatcacttcttgcaaagaaagtctaaataaattcagaatctaacaggaggataatattaatggttaattaatatatatatcctccacctaaaatttcaagtcaatctctagctatataattattacaatctctaagtgacaaatggacatgaattagatctatttgagtgtttaagagtacttttacttctgtttttaaaagtgtttttagcttaaaaaaatattaaattaatttttttaatgttttctaatggttttaatgtactaatattaaaaattaaaaaaaaattattttaatatattttcaaatgaaaaataccttaacttacctcataatccaaaacacacactaatcaagactacacaggacattaattatttgtaaactggaatatttctaaagttttaataaagctaattttttgaataaactatatcctgttccgacttaattatagctgaagtctctgactagacctgggtatcaaagacacaatatattccttgggggcttaaaacaatttttgtaataaaattaataacaattggatatatatatatatatatatatataattatgacaagaaaaggagaagattttcaatatatataagagttagataactatataatccgaaatgacaatcattattgtgccaatatatatatatataatcaacaagccaagatagagagtgtcttaatcatttaaggtatcattgaaacctttttgttggcaatgacatgaactaaagcctgtctttgcgctcaaaaccatcttggcaattatgatcttattggttcataataagctaaaaagtggattgtactacgaaacaggagaaatgatgtcaagtgaccatccatgcacataatgtctggtggtaagatatatctaggtttatatgcgcgcagagcatggctcttcccccctccaaaaaaaaaaaaaaaaaaaggaaaaaaaaatagaggtaaagtacaaaacatatcgtggtcatcatgattgcaagagggcctccatttctcatatcttaataccaaaaaaagcttcacatggtagaagaataacactacaaaaaagatgtattcttcttttggtgatataaaaggtattctactctcctctctgacaatattacaggtacatctatacagccccaaaacataaagattctcacgcgctctatctctatgaattctaatatctttttagaaatgggtaatttggcaatggtgtttcaatttagggtagattgctacagttaaggaagagagatagagagagggtatcttttgacaaaggttgtagggctgcacattagggatagatactttattttattttattttattggtattactatacgttttcttttatgcaaggttaacttgtccccccccccaccttgctttctactagtgtgtgtgagagggagagaaacaaatcccaccctctcttcttcttcaaaaacgcaccctattcttccctatttgcatcgcatttgttcttgaatctctttgtattcccagagtctcttagagagagagagaaagagagagagaatgttccataccaagaaaccctcaactatgaattcccatgatagacccatgtgtgttcaaggggactctggtcttgtcctcaccacagaccccaagccccgtctccgctggactgttgagctccatgaacgctttgtggatgccgttactcagcttggaggcccagatagtacttaatctctctttgactagctagtctttagttctatttttatgtacgttcctaatttgtttgtgctgataacttcttcaatctctctaatacgtgttctattgccccccctctctatgcttgatcaaaaaatttgcagaggccactcccaaaaccatcatgagagtcatgggtgtgaagggtcttaccctttaccacctcaaaagccatcttcaggtttgaatagaacattctttcatgcctcttttgcttttgtattgacacctttgcggcattttcgatgtagggttggcttgatttcattcattcttttccttctatctttaattttcatttctttaacgtttcttttctcttaatttagaaattcagacttggaaagcaaccacacaaggatttcaatgatcattcaattaaggatggtaagagagctaattaagccatctttatatacagggtttttatttttatttttatttttatcctttcggttgttaaaggtggcaaggaaagactcggattcgactcctttccttccttttgctttacacagagagtgctaaaattaatctaaatgcttacctgttcttttttaattttccttgctttgattcttatacatgcacaatgtgatcaaaatgatcagattaattttttcataattttccatggcaagcagcttcggcgttagatcttcaacgaagtgcagcatcttcatctggcatgatgagccgcagtatgaatgagtaagtattacattcaaaaatacctctctcttaaaccaaacaattacgaacaagcagagttcatgcaattttcattttcttctaaggataacaataacgatataaacaaaatcgcttaagtttctttctttcatttctgtggaatatatgtgtgaaactgtacatagcagtaactcacacatgattgatgcgattaggatgcaaatggaggtgcagagaagactgcatgaacaattagaggtaagcacagatcgattgttcctcaacatctactccaccccttttttttatatataaactatttccttaataaagacagtccgtgtagactttatttgatgcatataaattaattccaggttcaaagacaccttcaattaaggaccgaggctcaagggaaatatatacaaagtttgttggagaaagcttgccaaaccctagcaggtgatcaaaacttggcttctggaagctataagggaatggggaatcaaggaattcctggtatgggtgcaatgaaagaatttggcacgctgaattttccagcatttcaagaccttaacatttatgggggtgaccaacttgaccttcaacacaatatggataggccatcactcgatggtttcatgccgaacaacgacaacatttgtttgggaaagaagaggcctagtccttacgatggtagtggaaagagccctttgatttggccggacgatctgcgtttgcaggatttgggatcaggaccggcatgtcttgaaccccaagatgatcctttcaaaggtgatcaaatccagatggcaccaccatcaatggataggggtactgatctggattccatatctgacatgtatgaaataaagccagcgcttcagggtgatgcactggatgagaagaaatttgaagcatcagcaaagctaaaaaggccatccccaagaagatcaccactagcagccgaaaggatgagccctatgatcaatactggcgccatgccacaaggcagaaactcaccatttggttgaagctgacctatgacttgtgtagatgtaagtgacatgatataaattattaagcttctttataagtatgagatgtagggtttttggacttgaaagttactagcaatttattaaattagggttctgctctgggcataacataacgccatgcgtggcaaacaatccagttaaattgttatgaattaacaagtacattaaacttgtacttattttggcacttggcttcttcttgcttccctcgtgcatcttatatttcatggcttggaatacggtagcatattaattaacacttaatttaataaataaatttcgtggcaactcctctactactattaatattatttgcttgtaattaactcccatcccgtacgtttggtgtcgagacaacaaggagtcttcaagctatatatatatatatatatatatatatatatatatatatatatatatatatatatatatatatatatatatatatataacttaatctccttcattttatctctttattgaaattgacaagtacagatacaccacagcccttctagtttgtgcatagaattacatacaaaggcaaatgctacggattcttgtcatcgccttgctcctttctttattccatgcatgaaattaagttcataccagcttagcggattaagttcatggtgttaacatttcatgatatcttcaaatgtcattcgaaaacagattggtatcatcattaaagtatgtgactgggttcagtttcgaaccatgatagggatatctaatgcaaatttaaggacagaaagaaagaagatatttcatcgtgtccttgaagacccattgaatcttctactgaacaaaaaatataaaaaacaaatgccactgtctttgccattatccctgcaaaaaaaaaaaaaaaaagccaccggctttaatttttcagtcaaggcccgagcttgaggaatacaggcatgagttctagatcgacaatttgcgcacttgaccttcctcgacgtggtcgaagaaaacaaactgaaaagacaagaaaagaaaattatgcagagtactcctcttacatgcatgcaagttatttatcaataccatcactaattatggcccctatttatgtgagaacctgggattttttctggaaacaatgaataattaatccaaagaaagagcaacatcttccattttcttttatgagcgaaaagggaaatcaagcaacgcctttattaaccagctgcaagaccagaccgggctaataccctctcgaacaataagaaacggcaatcaatttagatatatatatatatatatatatatatatatatatatatatagggaaaaaaaagaaaaaatccctaaatttgaattaagtatatgcaatatttatgtaaagctaaaaccacatgaaaaaacatgtatcatggaggagtgaaacatgtgtatccagaacctcaatgcattatgatacagcttattttatgaaacaggaaaattcaaaatttgttctgatgggggcttttacaatctcatagccctgtacttgtacaatgtcatgtttggtcctcgtgggtcaatggtcaagccatcatgcctgttacgtactaatccagaaatctttttctaaccgttgcttttaagttagttgctctcagttagttagtcctatcattgcagacaaagccattggggaaatgaacataagaaaaaaaaatccactatatccctgtcaaaaaaaaacattctagggttttgggaagcacacatgcagcagtaaaataatacatttgatctgagtgaagggagagattacatatatggaaagcttttttaatgaagaataatattttacccttgagagaacccgacagggggtatatctagctaattcatgctcctttaattaattactactgtgttccaagggcatcaaaaggaagaggacaaattactaactagagggtaatctcatcattattttggtatgcatgcatcagcatgacgtgaagaaaaaacacacatatccctttcaccatattcttaactaagattttgcctcccctgatattgaaccctttttagaaccatcatatgatcattatatacatcgacaatgtatgcaattttattaattagttgatcttatggtgcatacttttgactgataaattctctaccaatactgaaccagaactcagattttcatcccagttccatatttgcctatattcgcgcacacacacacacatatatataggcaaactaaatagtaaccaaataaaaatatcaccctttagttatatatcactaggttggtgatgtagcaaagatgagaaatatgcagaggtttctttctctttgttgatgacaaaaaagatgtggtgccactacctttatcggttgcagagaaattgtcaggaaagctccttctctccacacagacacaaagagaaagaagaaaagctaataaagcctaaaggagaggaggaatacaacgcactttcatgagtgcacatatcgaggaagcttctacctttatgtgtacagagttgagggtcttccttgcctcaaaacctgctgcatgggtacgttttatattacatttacactaatttacatgcataatgtgagcattatgctttatgtggtaatgatcatataataagattatgaatctgccaagaaagaaaataatgatagggtgattgaggcacgatgttcgaagcaaattaaataattgtttgcatcctaattaaggcaccttggattctgtttagcttcctcattcgatacgtttgggttcttgctttgagtgtttactagcaaagtactggctagaagcttcttttgtcccatgtctctcatgcttttagctaggcatgtagaaaatttgttcgtggggattgagttagttaaggataaaaataaggttggatatgtggtggtcacgctaaggacattgactggtgtataccgtttactgtgataattatcgaaaaatacacccgatgtagatttttgtgtgctcagtttcactaatcattgccaaaataatgaaaataacattcgttatgacctttttttacaaaaattacactcatgatcttcacttagatgttttcaaattattatcaccctaatttatcctttttttttacaaagaaaaaaaaatgcccatgtacatcatttgaaccacgaacatctcttactgtttatttcttagaaaacactataagatttgtgtttcacaaaaaagataggtaaaacaaaaacaaatatttttggttgaagaaacgaaacggatacataaaaataaagctctgtctagctatgacggttttaaagttaaataataatgtctttttaaaataaaaaaataaactaataacatgtctatcatgtctcaactgtacatgactcttttgttaaccaaatattaactaaagtaatacaaaataaactggaatttaaatatctatagacaatgacaaggggacaatttgttcagatgggcacataaaaacaaggatggttcatgtgattttataaataaaaggaatgatttgtatatataattgtaagctaattataagacacatcaagaatggtaattgataatgtctccgttagtttaacttttcacatgaaatgatcatgaaatatcacttatatatccaacgggataataaatatttatgaaatcaactacttaacttccatgggaacatggatttaagagacttttaagaatattaagataagtcctcatgtttagagaaaaaaaataaaaccttacatgcaagcatttatacatattaaaattaaaaaaaaaaactaagattaatcagtgtttcattatggattccatcacaattcattgtggacttgctcaaatgaattaatgaatttatccttcttaaacaaagcaaaataacatgatttgaggagtaatatgatatttttcattggatacatttgtcattataagattgaataggggcatatcggtatttttctttccttttgcattgtgtaataactcaaataccctcaaaagcataatttaattaacttttatgtaggtatattttttagttttcaatttcaaaaggacaataaaaaatctaaaatacccttctaggaaaaaaatcatgtagttgttgtttaggggcttttttgtcttttcgaatgagggttaatttggtctttaataaatgcaaaaaaaaaaaaacaattggcaggtgcaggctcctattataactaaacataggctttcatggaagcgttagaaataacccactaaggtctttctagtgggtagacgtgtggcagtggagactgccggtatggctctgatgggcttttttctagtcctttttatatagggttatcatgggtcatgagttagtcaatttaaccaggtttaacttagtttttgtttcaatgttttttctattgatttaactttggtcttctttttcaggctttttttttaaatagttttttttatcccgatctcatatcacaggtcgcaagtttatcaaattaacttattttttttacttttcttttcttgaaattgattttttttttccatttttatcatttaacgataggttattaggccttgaattgtgatttttttcttttttctttctgttgggctatcccaagtcacaagttagtcatcttaggctgactcaattttttttcaatggctttttatttaactttgatcttttttaaaagtaatatttttttatctagaatcatattgtgggtggtgagtttgttaaattaattagaattgactcaaatcatcattcattgcccaaacatttttttttatattatataaaatttaacccaatctgcgatgcaaggcaggcaaaccttctagtaagaataataaaggatgagggttgaagcactcaagagacagtactttagcaggaaatagttgaattttccatggagagatatcagattcaaaccatggaaaaaatgggttggcgattaagatgaaggcttgggaaaaaaaaggggggcatatacgcgcacacaaacttcctgtattcgattatgaatttatcattgataataaaaaatcaattgtttgcctttgaaaaaataaaaagagggcacgggacattcaatatgcttggcccaaaataagaatgaaaacctttcggagacactctaaactcgcctgggccttaccacaccgaaatgctctaagtggagctgttttcgttgaacgagctaaagcttatgaaatagaatttctgtttcaaaatacacgacgtcctatcgagctgcctgatgccccctatgcttaaagttttaaaaatcctaggtgctactttgtaacaagcaggacagtcgacggccgaattttatgaaccaccgcaacaacttgtgtcaaagtgaaactaatattcagcacatattggattccacatatcatcaaatcaccacagttacatggaaaaaaaaactcatattcaaggttgtcaaaaacgtttttttaacacgacacggaatatataatataaactcgaatcgtaaattcaaatcgtaaaattataaaatcaaaaagtaaaatattttaactaattatatattgacaattacagttaagtagtatataataatataacacaattaaaataaaagtgaaataaagcgaactatagcactttcatcaggaaaaaaagacacgggattggatatatccaactgaaatcaagctatccatgcaaagagttaaaaaaaaaaaattaccaacaaatagaaacatagatcaatagaaaagtctactgtacaaagaaaataccagtttttgctcatcagctcaaatgaccttcttagtttcttcatttaaatacatgttggcagcagagtgttagaagataaatgggtgaggggtattagtatatgctgatttcctatcttaacttcttatacagcatacacttagttggttaccttatgcaagtcacaaacactagttcgacaagttccataatcaacaatgaagaacatgaattaagcattctactgaatcccacaagaggggcaaattgtaacgaacaagctacacaaaaagagatcacctaaaatgagcatgaaaggtaagaattcttgatggatgcaaatttgtgaaaaatctaattgatggccctatacatattagcagattgcagtttattattcagttaggtcagaacctaaaacaaagaaatatatcaataggcattctacagtcacacatttcacctctaagagaatatatcatgctctttctttgctcacaaaacaaatttgacattccatttaccattcatgccagcattgagggttcaattatttttcctaatttgcagataaggcacctgaataggaaaaataaataaaaagtggaaaaaggaagacaactcaagtcgaaagcagttgcttttgactatgtataacacaatgcacatgctttcagatgttttaaccataaagttatgggaaatgtaccttggtaatcacttcatacccaattctgaatctaacatcttgttctctatggaaattatagatgctccaagatacttccgcagctgcttttaaattcctctgtcatggtaagggaaggaagatattagttgcatatggtagctaggacaacagcttacaatttacttcttgtatctagctccccatgaacctaaacaaaaacaaaaattaaaaattaaagccctaaatttgcattttaaagaattcccataaataatatcaagaaatcaatctcagttacctgcaagtgggtgctggaatcaatggcaaacctcttattggcatgaattttgagggctttggaatctactccatatcttagagatgtctccattgttgtatctctaataatctaaaaaacccaccgaaagccaagtaaattgcaagaacctggttctggtggttgcgcctccgtcgcagtggtgaagacttgagtgtagagagacaaaaatgggtgttttgagagaaagaaagagagtggaaggcgttgccggtggatttgaggaaagggggatttttgtgagacaaacgggatggagaggactgagattctgagaagagtgaatagattttgttaattttttcgaacgtttgaccgattttaaccgagtttgactgagtttaaccgagtttgctacccgatttcacactatatctctgagttgactcgtaaaatcaggcgattttactagtcaactcgcgagtttgacaaccatgctcatattgcttcccatagactccgatctgtaggctaaggcgcagcacctcctacaaggtgggcctatgagttgtcagatctctgttcttcttgggaactaggatatgtttttctcagcttaaagttataggggtgttgaattatacgtgttaaatatatgatttaagaattttcttcgagttatgctgaaaaataattggactagacctccccccattaatttccatgggttaatgtcgggacaattcaccgtttaagcttaaacgccttctcttatcagaatcattttaatgcttcgtatttatggtggatgcataaagtttcttatgagaaatgttcgtgacttttacttcatgtatcacatttctttcttggatttaataatctaacattctacctaaatgaaatcgaaataacagtatttataaaataaataagaatatataaaactttttatataaaaaaagtgttttcccttcgaatccaagcgaagcaattaatctcaaaaaagaaaagaaaagaaactccatgacagggtttaaggcccaaaacaggctgagacaattacaatatggtttgttgcttgattactaggtcacagcgcattaagcccataattacaaatggcctactacaaattatttctaaggttaataagtccagcttagagttttctctgtgtcctcgatcaggctcttcccagcccgtgctttatccccttcaaagttcgatgcaaatcccagttcatgagttttctttcagaagagacattataaatgacaaacactcgccaatgtcagtaagattcgttctccgattttcaatttctcagtagcaactcaaaagtagacttgggaagattataacaagcttgaatacaacttttcacctagctatattatagatttaacgcctgtgaatacctaataaacttaacatcttattccatcccaagcttgaattggtcattttgttcttcgtggcttggaaaccggttacatactacacttgaagattaaatacaccacaaaccccaccagtattgcaattagatcaaaaacatagttatagttaatgccagttaatcatggagaagcatcatagatatcagcaggagggatgaaataatccatggaaagccctggcacattgaacacgacatcatcgatcctccatacttcttccattctagtcctactgtgttgcactgacacttcctcgaatcgaaaaactgtagcaattgaccttccttgatgagcaattaacacaccatccacatctctatagtcgccaatactacttcctatagtagtctcccaatagatagtttcattttctggagtttgtacccttgttagatgggagtcctccaaatacattaagaggccacttttttggcaaaaatagccatacagtacatgcctaagcacctcagctggcccttcacttctttccattacagcttctcgatcagcagctacttttaaaacgaagcaatcatcctcgccaattcttttctcccctaagcattgtgctttagcaaataagctggctgtactctttggatccaggccctggaataccaccacatgattaattaagtgcacgaagaaaaggtctaagttttaggtgatattagtgttcgagcacataattagatgcaggacagggtactaataacttgtaatttaagaggtttcaggtttgagcttatatatatatatatatatatatatatatatatatatatatatatatatatataaaactaaggaagcatgacaagacacctgaaatcaaatgaaagaaccacaaattaaattcataaatttcaaagaattcaatgaaatactgttagacactgatccctatcttttcgtctgagaatggaggatagctgatctaagcctcgaattattaattagtaaaagaacaaggatatgatgacgagggaggtccaaatattttggtacttccacacatattctagctcagctttgacatcctaataatttcaataatacacgaaaataaaggaagtagaatcatatgttttttattcaaggtgcacaaaatctcaacagctgcaggccagtgattcctctcatgtcatggcaagcaaaggaaacatatacaaaatggggatgccactcctgaaaaaaaaaaaaagaaacctaagcataaatgttcctccacaagttatgactaattccctggttttttgtgggaaacggggcttggcccaaaaactccaaaggaatgttcatccctccgtcacttgactcacttggggctagaggcaaaggaaggaaccccggacgaggtactgggatttcaattttcaagtatgccacgatagtttctaactttgaaactcgccataatttcgaaaacgaaaaaaaaaaaacagaaaattggagaaaggagagaaggaaaacgattgacatgggaacgagaagaaaataaacaaagaagaggggggggaaggcaagaaaagcaaggggcgataatgcaataaatcaggtgttattcactaaagtgcaaaaaaggaaaagtaaagtgcaaaggatgattacaagctgcagtcccaaaaatatactttgaacatgatcaaagatgacgtcaaaaacaaaatcacgtgccattcctaactctgaataacgtgagagttcaaaaaaagaagctagtctgtctggtaaagctcaagacagtttccctatcatgtcagctacttgtacatagatcctaccatttctcgggattgtgatctatacatatagataggtcttcaaattctattttttttaaaagaaaaaaacttgtattggtcttccatccccatccttatgtctggtatgtaaattcgattaaagtagattaaaagtaaattgtagagtaaaaagcaatgttcctaattttgtcttatcgtcttcaacctagagaaaaacagaaatattcctcagttcaccctgttgtttcttctccctcatagcccgatattgcactaccagttttagatcactagttttctggctaatgtttctttatgattaactaaaactatggtcttcaatttttaagggggcaatttcatcaagattaatattgaatttgatgcactatatatatagtttgtacctggattatgcgacgtagagggcgttggggtcccttggcagcatgagtgccaagccaaggagtgtgacgccacacggtcttcccatcgctgcctgctatgaccttattttccccaacaaccaattcaagagaccacatccccggcaacatttgccaaagaacaaagcacccattttcgccacttctagtccccaagctcttcacgttttttcccgaggaaatttctgtctcgcaacgaatcatcttcacactccctgttgaatacatgtttttcatacatttttgttgctttaaacaccctgttgctgccaaatattgttggatgatataatgcgcggcagaattttcctatagaaaaaattgataagatggagttgccgaattaagaaaataaacatatggataagtagtgtagaagaacttacaataggagtgtttttaatgtgaatgcgatgaatggggtcgttaactagagggattggagctagagggcagcccaaaactccaagtaaaagccttaaatcttgtcctttgactggaatactcccatgtaacgatactgaaaaactgttacctgctggaagacccttttgcaatcgaaaccattcacgaattacttcccatgagctttcctttttgttaccttcttcttgcatgtcggggtcaggaccttctagcagcggagttaaggtttgtgtgctccatctttgcttccttcttgctcttgagcccatggttgcgaggagattaatgttatgaaatagaaagtgaaagttgttgaagatgaagaatggggtttaaagtaaaagtgaacagaagttgtatataaaagcgtttattacggttgtgagtatagctaagaatgagaaggaagagacaaaaagggacagcttatctgtccaacggcagatgatggtaattattataatacagacttgcatgttgggatgtctttcgctttattctttttttttttcttttagactcctcttgtcgtttaacttctgcagggattctcttgagaaactccaggtgagaggagccggatggattaggggctgtctctttctatatttaggagataaatttagctctctctttctttctaatgtctctgtggaccctttgatcataccctacatttttttatctcctaattaccctggtcttcaggggtaatcttccttaaaatcactgcgtaataagagcagtgaagtcttcatgattggcccacagcaacatcgatacttcatttcattcatttctccagtgtttattcatctgctacacacatttcctgggagttttctggtatggctgtagccacgtctatctgcactagagacgtacatagataaataatgttggtagggttctgctgccaaggacactcttcctgtttcaaccatctccactgacatatttctacctgaaatttatttttatataataaactaacacagtactattcaaaatgtgagctcttaacttttttaatgacaaatatacccttctcatcacaccccttgaatcaaactctttcaagaactctatattaaacttccaatttcctaccacttcttatgtgtgtgtgtgtgtctatatatatatatatatatatatatatatatatatatataacagcgcatcttacaaaacatattttattttagaatatatattttattttaattataatatcccgccagtactctagataaaagtaatatttttaaaaaataaaaatcgacattatagaaattgagttttatttttgaaatgatgtgctaatgatgttctaggacacttcacttttatcgtagataaaaatcggttcagcgtaaaaaatagtgggaggtgttgccaataaaagtcaaaagcaaacattaccaagagtgtggaaacgtagcaaactcttttaaaaatataaaaaggttattttaataaatttaacttctgcgcggtgactttaaatttaaataagcaataattacaatattccctttccttagttaatggacagcgattaacctctcttgaattcctgggtgtcttttcaacactcttgattcggtacgatgctcttggtaatgtttgacaaatacttgagtacaaaatcctctccggtcaatagatccagagcttacacggggcaattgaggttcagtccggtcaaatgatccagagcttacacggggcaattgaggttcagtgcaatcactagcttcctggccgtatcttctttaatggtgattattaaatctgcatttcccaaaatggttccctcgagcgtataatcttgtcaccatacgataatttaatttccaaaagaagaatcgtcgaatataagcctacctaatcattagaattaatcacagaatttcttttttttttttttacaattaatatcagacgaatttcgcttttaattttatatataactactatcagccaatttatcaaaccttaaatatcagtgatcatgatttgtcagtgaataccagaaggaaaaaaagaaaaaactaggtgcccacttgcgcttatattcgacgttgatagtaaagttgtcttgatttttttgaaaaaaagcttatcatctgggatccacaaagaggtgggccggcaattgtatctcaatattgcgattaatgtggtggagagtcggcatcaatggcggagaggcagatggagggggatgggtgatcttccaagccgaaagcactctctgttttggtgaaaggttgagacgtaactttcatttgctgggaagtataagcaggatcgatatactacattaatttgacatcgaaacacatggtaaaatttatgcacatgattacataagaatagctggtctctcacatcttagtcttgtatttcaagtagacaaccatgacgttaacatcatctcaccctgcaaaaaattgcaagatacaaaagaatgcttgacaaaaagagggcaactttgcacttgagacaatctcatgagaccaaactctaagacatcacaagtacgggtgttccttgtttcgtttataagaaagtttgtttcgaaattaactccttttttcttaaataatttgggttttagtattttttactaaacataaaaccatttttaaaaaccttaagaggggaatatcatgacattaggtctacagtggagttgtaacccttttttttacatgaatattaagaactcgtttatttatgtgattgtttgtttttgtaattgtatcacgttttggtttgaaccacaatatataagtgtttgattgcaatttagatctatgtttttattagttgaacccatcactttaccaagtttatacttcaattatgaaaaaacaagttgaacctgctttttgcacacaagtgtggagtgatagattttcttgttactgttgaagcatcgagaatgatcattgtagtcttttctcttcttgttttatcattctagaataccaaatatgtccaagatgatgtggtgactcagcctccatacctcggtaaagatggaacatgacggtagaaagttacccgagatagcccattcattttgacgttgatgcgttcgcccttcgctatctgatcagcaaactttagaaagtttacgcgcattgggcccttacaaaaactgacacttgcccagcaaactagaacaaaaaacgcaggcccaagagccttaacccagaagttcatgacccgccttagaaacccagcccaagtgaaatacgaaaacaaaacaacaattgctctgcctagcaacaattgtttggtggacatgctgcctgttttgttaccttcgtattgataaaagggtgaaataggagaagacgaccacttgaattttgtatatcaagtgagatatgtattatgtagcatagttttgaaacccaacctgattatcgacccggtccagtaatcgggtcacaggtcagatgaatttacttaggtcaaccaaaaaaaaaatacctatataaaacatctaattagttacaaacccttgcataatctcaattatatatactggtaaagcagcagcgaggcagaaggtcgcaacagtacctccttctaccatgcatgttgctgttggactccaagacttggaggctatctactctgaaagatttcacatacatgtcttctttcaaatctgaggatctctacctagcatattcagttgaatgtttcaaattaattaagtaggataaaaaaataaaatatttactactatatatatatatatatatatatatatatatatatatatattacaatttacaggggctagtaccaagttgtgtattttaaagggataactagataaggaacagagagacaaagaattcaagagagagaggagctttcaaagattccattaatagactaaaaataagtgaattagctaaattataatacctaactgactaattgtggtatctgcatcagcaatgatgacccgggcaattgcagcaattctgtatcagtgaatcagtgcatcgttcatctcgttgttttggtctttcagccaaaacgtcgcgtgacctttatacatatataaaaaaaaggaggtcggtctcacccgggtttacccgggtctgccgggtcccggattgacccgccaggtcgaccgggtttcaccagaccaactctcagagtgagttttttcttagatccagatcggtttcatgcttgggtcagtcgggtcccgggtcaacccagccagaccggtccgagtttcaaaactataacatgtgttgccgacggtatgaattgcatgtagcattattcctcggtgtttgtgcactgttttgtgtgtcactgacttcatagttgtcggatatgggcttgtaatctgatgagttaattaaagtttaatttcaatcaaggatatgatttcaactgctcctgctatgacaaggctgccaactgccatacagtgcagtaggcagacaatagtcacatggattatggacgtaacatgtaaccaagagatctgctcgatccagctttagagcatctctcgagcgaggaagacatatttatcaatctgtgtcggcaattgtgaaaagattgcaaaaaaaacatgagtcgggcaattgttggcacgtcctttaataattgatgcgtgttttttttttaaaaatcattttatatatttttaaaattatttttatatcttcatgctgaaaataatttttttaaacaaaatatatattattttattatatttttaaataaaacacccctttataaagctaaaacactacatggtgtctttatcttcattgcagaaggtgttcttgacaagccatgtggttgttctttgttgtgggctcatttgtttcaaactttacagaagttcgtttcttgtggcatgaaagattttatcttaactcagtattttattgctgcattataaaactcagtaaaacaaaaataattatcaaagcaagatggctataaaaaagaattaattaaaaaaatattgttttaattattttacaaataaatcacgttcttctctctctatgtatatttattttattgcacaatggatggattttccgatctatccaggttgagtctggaaaccaaaactagggtacaagaattcacccgtagaataacttaaaataacctccgtctgcaccacaactttatatttgcatatggccgaaaacaagcagagccgatcactaacttggccctaaacaataatttgtcagccataagtggtccatgctatcatttccatgactccagcaagagtaattttgatttcttgttaataatagtgcttgttgctatttccatgattcttcatcatcactaatcttgtgattccttgttaacaatagtccttgttgctatttccatgattctccctgacgtgttttatatgatcatccaaaactaatcatcagcttcacttggttttatttttttcgacgcgatccttggacagaagacctatagttaccggccagcctttaatttcttatcccctatgggccaagatttattgttgaagacaagctagcttcactattttcatatctctaccactcaaaaaacagaagaaaaaaggttcatagaaccaaataccaaaacatggcaacttcagctccacttatctcaaaatcccagttatcgtccggcatagaaaccttggatcatcaggagcaacactcgctagatgacaccatcgaaaaatacatagaaggttttggaccggcacaatatctgcaagtcatccttgtgtcattggcatttctgttcgatggacagcaaaccttcattagtgacttttctgatgctgtaccctcatggcactgcactgattttagtaatcaaacttgttactcgagctccaatttttgcaatctctcaaacactgaatgggcctgggatgagccagccagctcatcgatagtttccgattgggcccttgaatgtggcagttcagtcatcgtcggcttaccggcttcaagttactttgtgggctccctgattggtggatttactcttgctacgcttgctgattcctggcttggtagaaagaagttgctcttcctaacttgtatgggtatgtccacaatggcacttatcactgccttctccaccaatgtgtggatctattcaggtttgagatttgttagtggactttttcgcgcatcaattggaacgtgtgttgttgtgatgtcaacagaaatggcagggaagaaatcgggtggatttgtaagggtggtgggcttcttgttttttgctctaggagcactctcactgccccttatagcttacttgaatagaggttctccatggagatatctttacatttatacctctattccagccatcgtttactgtataatagcttatttctttgttagtgagtctccaagatggctttgcatgcggggacgtgaagctgaagcagttgcaattctgaataaaatggttccaacaaaaaatattagtagctctattctaaaatctgcctacaagcccctcgaccatgagcagtcgaatcttgacatatattcatcgatgaagagcttgctggagaggagatgggctttgaaaaggttgttggctgcaatgactcttggttttggtgtgggaatggtatactatggcatgttcttgggggttggaagcttgggtttcaacatctaccttagcgtgacacttactgcatccttgaccataccttctattcttttgctcccttatgtaatagaaagatttaataggagaagttcagttgtggcctttggtatagcaagtggggtatgtagcattgtctgtgcaataattggtgaagaactaaagactgtccagattatcatgtctttagcatctgctttctgctcgtgtgctgcacttaacgtcctgcaaatatacactacagagttgttccctacttgtgtaaggatttcagccacatcaatgtttaggcaagctataaacttcggtcccatatttgttccactgttagtttcagctgccaggagaaataattctgtagtttatggagtctttggatcagtagaaatatcctgtatcttctttgtaatcttcttgccagagaccaggggtttgtcactttccaacgccatggatgaacaagagaagaaggataatgcaaacgcgtatgtaagctgattataaaatctttatgggtgtctggtaagaaattgaagaagtcaaatcatttatgtatgcatctagctacttttaatattacttctgattaattctctattttcccgcttggaaactgtccgctattaaattttcctctctctttttttttctctccttctcctgtaatttgtttgcatttttgctagatgatacaattggggtagcaacttaattagcaatcaagtttggtctagagcaacatgcagtactcatcaaacagttgatgatctccattaaaccatttggttgacaactagcaagttctgatgggccaactattggcaaatccatggctgatcgacgacttttgcccaccgccgattgcccagtactggcaaacagtcgtcctgtgtatatgtttttcttttttgttaccaagaaaggaaatgtctggctgtgttcttaactacgctctataacactgttttcatgcttttaagtatgccagactacaattctgaacactttgttagcatatctccacctaagtttgaattcatcaatacaccccaacaaatctccgctctcgggaacatataacttgataaattgttaaattaagatattgtgggagggggaaacaattttatatacagattatttatgattacacctcctactcaagcggcactaggaatttttctaccgttcaaagactgattcaataatcaataccactaggaattcaataatctaattaatgatcaccgtcctcgtggttctaattaattatgttgtagccattttgcccaaagtatttctctcatcgaaaagttcatcatgttttgccagtgaaggaatttgagaaaattatctagtacttgatttcttatcagtatactctaaattagcaatatcataattagagctaaaataatattattatcagagatgaaaaaactataaatattccacatgtaaatagcaaatgcagagaatgctggcaattctagactgctaaaatagcttgtgcaaatttgttttgattctaaaaataataataataataataataataattaaggagtgggagaacaatccaagtagcttgtagcaacggtgagcgcataatagccttttccctctcttactcgcccaatccatcgaattgcagagaactccacttattgttttgatataatagttttgatataattatacaattaatttaagacgaaagaacactagctaaaattaagattttactaattggaatattcttcttgctaaaaaaattccagattgtaattttagatttgagtgctctctagtttttagccacgcaatttgtagcgtcagactaaacaatagtaaattctatcgtcaccagggcacaacgtgtaaaagcctttaccaaacactctcgttccaagcgagatataaatgatggttacaggcagggagcattgagcaattggtaggtctaaacaagcttaattcatttttgatgtgtttcatttaaaaaaaaattaaattaatatttttattgctttttaataattttaatatgctcatattaaaaatatcatgcatctaccaatcataatgtaaagcattaatttaacccagcaatccactagagtaattgattgggcccattttttaattaattaactgtccgccacctaaagggttacattatcccacatcgaaaaagggaaaaatttggacacctccaactattgtggaatttttatttatatattatatttatttcgtgaatctcaagaactataacatgccaattcatagtcaaaattccatgcttgctatatgctgtagcgataagtttatttatggagattccgaaaataaaaaaaggtttatttatggattaagaacggatgttacgagtcatccaccatttctgtgatattatctcgctattgtgctaatccagattcttcatatatattattattttaataaattgatgtaaaaaataatttttaaaaataaaaaatatatattatttttatatattttcaaattattttttttaaataactatatttataatactatatatctctatgctaatatatcaaaataatattttttttattttttttaattattttttacatcaacgtatcaaaatgatttaaaaacactaaaaaaaattaattttttaaaataatacttttaaaacccaaaaacatacactatcttaatagtttatatttcaacacaatttattgaatttgagataattattgcccaacatctcttccacggctttactcaatattgcggaaacatgataacaagctgaaagccaccgttgttgctggttttttgaacttgtcaatatgacttgaattgccgatgaaatttcctgctgcacgcaaacgggttcttcaaattgtggcaagtgtgcgccaaaacaagtcgccatcataataatctttcctgtttttttgaagtatattggtcccgtggaatatgtagatgtagcatgttagtggaattaaagatgcaaaggattgattgacgaaagacgacgggtcatgaatatatgtcgacaaagaaatcttctggaccatttaccttgcattaaggactctttatttatcggatatataattcttttggccaataacataagattagtttaaaaaaaaattatcaatgtgttgcgagtaattagttaaaagtcttatattatgttagatttgaatctatagagatgagctttagttttttgaccttcacatacattttgtttaaaaagatgaagctttgcatatataaatttttttaaaataaatatctaaagaaatatctataaaatatttaatataaatatctaacttataagatatttaatataaatattttatatgtgtgtgtgttgtgtaaaacatatatatgtgtacaaaattttattttattttttaatgtataattagagcttccaaatcttgcaaacggatgtctatgagaaaaaataagagggaaaatacttataatggataatacttactatcatcacatgtcaatcttcttctgtccaaggaaatcaaaaattgtttttttttttattaaaaaggaaagcaacttttagagagtactagttattgataattattatcgacctgagtctgacacacatattttacacacagatcagcataccattaatgaaattttctattgccttgtacagttagatgtattattattattattattaatttaatcgcccgcccatggtctctgtgacattgacatggatacacatcacagaacaaccgatggattctaaatagataggtttccagctcatatctagtccgaattcagatattcacatgtaattaatttattagatccagcttgtttaaaaaataaatttaatatgatatattttttaatattaagattgaaatatatttaatggacttgattatcaaggcttaatctatcaaatctgcaatttagattataaagtttaaaattttatttttaaaaaactattttttacttagctatacaataataaaaatagatgctcgtaaaatgaagtacaaatcaaatacatggttatttctttaagattcttataaccttataaaaatgaaattgaaaaatttattaaacaaatttaaaattaaataaatattaaaaagtaaaatggaaaaaaaaataaaaaagaggaaaataaaaaaaagcaaaaaaaaacacctcttttaccggataagttgacacccaactattttaatatagcaagtaatattaatagttttcacatagcattgtttaatagtgaaaaatattttatagttaattatcaatattgattttataaatctattttaatataaaaaaacatgtacaaatataaaataaatcatgataaaaatatctatatttaattttatttatatgaaattttctcttatatatatatatatatatatatatatatatatatatatatgtataatttgtatgtaaggtaagaaggttaattgttcctacccgttatctagaataatccatggcgtcacatatgagttgctgatctggcacatagttatgataccatgtgctgttctccgccactcttctattttaagttcttccaaaatcattagtaacaannnnnnnnnnnnnnnnnnnnnnnnnnnnnnnnnnnnnnnnnnnnnnnnnnatgtatgcatctagctacttttaatattacttctgattaattctctattttcccgcttggaaactgtccgctattaaattttcctctctctttttttttctctccttctcctgtaatttgtttgcatttttgctagatgatacaattggggtagcaacttaattagcaatcaagtttggtctagagcaacatgcagtactcatcaaacagttgatgatctccattaaaccatttggttgacaactagcaagttctgatgggccaactattggcaaatccatggctgatcgacgacttttgcccaccgccgattgcccagtactggcaaacagtcgtcctgtgtatattttttttgagaagtatatgatttcattgaacaccataatctgatggcatgtgaaattacaaagcctgtagcatatcaattttgcaggaattaccaaacaaaacaagatccatataaagaggacaaaacaacagatatagcctaaaaaaataacagtagaatctacacaaaatagccatcacaacaaaatccaggggaaactttcaagagtctccagttcatctctctagtgaatctaaacctctaaaatagagcacttttagcagcctgataaacataagttgagaaattgatcaaaaccaagcaaaaaaatcactggatcgtcctgtgtatatgtttttcttttttgtcaccaagaaaggaaatgtctggctgtgttcttaactacgctctataacactgttttcatgcttttaagtatgccagactacaattctgaacactttgttagcatatctccacctaagtttgaattcatcaatacaccccaacaaatctccgctctcgggaacatataacttgataaattgttaaattaagatattgtgggagggggaaacaattttatatacagattatttatgattacacctcctactcaagcggcactaggaatttttctaccgttcaaagactgattcaataatcaataccactaggaattcaataatctaattaatgatcaccgtcctcgtggttctaattaattatgttgtagccattttgcccaaagtatttctctcatcgaaaaggtcatcatgttttgccagtgaaggaatttaagaaaattatctagtacttgatttcttatcagtatactctaaattagcaatatcataattagagctaaaataatattattatcagagatgaaaaaactataaatattccacatgtaaatagcaaatgcagagaatgctggcaattctagactgctaaaatagcttgtgcaaatttgttttgattctaaaaataataataataataataataataattaaggagtgggagaacaatccaagtagcttgtagcaacggtgagcgcataatagccttttccctctcttactcgcccaatccatcgaattgcagagaactccacttattgttttgatataatagttttgatataattatacaattaatttaagacgaaagaacactagctaaaattaagattttactaattggaatattcttcttgctaaaaaaattccagattgtaattttagatttgagtgctctctagtttttagccacgcaatttgtagcgtcagactaaacaatagtaaattctatcgtcaccagggcacaacgtgtaaaagcctttaccaaacactctcgttccaagcgagatataaatgatggttacaggcagggagcattgagcaattggtaggtctaaacaagcttaattcatttttgatgtgtttcatttaaaaaaaaattaaattaatatttttattgctttttaataattttaatatgctcatattaaaaatatatctaccaatcataatgtaaagcattaatttaacccagcaatccactagagtaattgattgggcccattttttaattaattaactgtccgccacctaaagggttacattatcccacatcgaaaaagggaaaaatttggacacctccaactattgtggaatttttatttatatattatatttatttcgtgaatctcaagaactataacatgccaattcatagtcaaaattccatgcttgctatatgctgtagcgataagtttatttatggagattccgaaaataaaaaaggtttatttatggataaagaacggatgttacgagtcatccaccatttctgtgatattatctcgctattgtgctaatccagattcttcatatatattattattttaataaattgatgtaaaaaataatttttaaaaataaaaaatatatattatttttatatattttcaaattattttttttaaataactatatttataatactatacatctctatgctaatatatcaaaataatattttttttattttttttaattattttttatatcaacgtatcaaaatgatttaaaaacactaaaaaaaattaattttttaaaataatatttttaaaacccaaaatcatacaatatcttaatagtttatatttcaacacaattattgaatttgagataattattgcccaacatctcttccacggctttactcaatattgcggaaacatgataacaagctgaaagccaccgttgttgctggttttttgaacttgtcaatatgacttgaattgccgatgaaatttcctgctgcacgcaaacgggttcttcaaattgtggcaagtgtgcgccaaaacaagtnnnnnnnnnnnnnnnnnnnnnnnnnnnnnnnnnnnnnnnnnnnnnnnnnnnnnnnnnnnnnnnnnnnnnnnnnnnnnnnnnnnnnnnnnnnnnnnnnnnnnnnnnnnnnnnnnnnnnnnnnnnnnnnnnnnnnnnnnnnnnnnnnnnnnnnnnnnnnnnnnnnnnnnnnnnnnnnnnnnnnnnnnnnnnnnnnnnnnnnnnnnnnnnnnnnnnnnnnnnnnnnnnnnnnnnnnnnnnnnnnnnnnnnnnnnnnnnnnnnnnnnnnnnnnnnnnnnnnnnnnnnnnnnnnnnnnnnnnnnnnnnnnnnnnnnnnnnnnnnnnnnnnnnnnnnnnnnnnnnnnnnnnnnnnnnnnnnnnnnnnnnnnnnnnnnnnnnnnnnnnnnnnnnnnnnnnnnnnnnnnnnnnnnnnnnnnnnnnnnnnnnnnnnnnnnnnnnnnnnnnnnnnnnnnnnnnnnnnnnnnnnnnnnnnnnnnnnnnnnnnnnnnnnnnnnnnnnnnnnnnnnnnnnnnnnnnnnnnnnnnnnnnnnnnnnnnnnnnnnnnnnnnnnnnnnnnnnnnnnnnnnnnnnnnnnnnnnnnnnnnnnnnnnnnnnnnnnnnnnnnnnnnnnnnnnnnnnnnnnnnnnnnnnnnnnnnnnnnnnnnnnnnnnnnnnnnnnnnnnnnnnnnnnnnnnnnnnnnnnnnnnnnnnnnnnnnnnnnnnnnnnnnnnnnnnnnnnnnnnnnnnnnnnnnnnnnnnnnnnnnnnnnnnnnnnnnnnnnnnnnnnnnnnnnnnnnnnnnnnnnnnnnnnnnnnnnnnnnnnnnnnnnnnnnnnnnnnnnnnnnnnnnnnnnnnnnnnnnnnnnnnnnnnnnnnnnnnnnnnnnnnnnnnnnnnnnnnnnnnnnnnnnnnnnnnnnnnnnnnnnnnnnnnnnnnnnnnnnnnnnnnnnnnnnnnnnnnnnnnnnnnnnnnnnnnnnnnnnnnnnnnnnnnnnnnnnnnnnnnnnnnnnnnnntcttaggagtagaggttcaacagagctgtgaaggaatacatttatgtcaaatgaagtatgctggggaaattttagaaagatttggaatgggaggctgcaatccagtaaaaaatcctatcgtgccaggcacgaaattaataaaagatggtggagaagatagtgagaattcaaccttgtttaagcaaataattggcagcttaatgtatctgtcagttaccagacctgacatagcgtttgttgtctgcatgttaagcaaattcatgactgatcctaaaacatcacatatggcagcagcaaaaagggttctcaggtatgtgaagggaactaccagcttaggagtgttttatagaagaagtgcagagaattctgaagatgatctcaaagtctacactgacagtgactatgccggcgatgtagaggatagaagaagcacgtctggttatgttttttttctaagtgaaggtgcagttgcatggagctcaagaaagcaaccagtggtgactctctccacaacagaagcagagtatgtagctgctgctgcatgtgcatgtcatagtatttggatgaaaagagtgctcaacagtcttggtttctcttcctgcaagtgtgttaagattttttgcgacaacagttccactataaagttatcaaaaaatccaattctccatggaagaacaaaacacatagacgtgaaatttcattttttacgtgatctggtaaaggaaggtgctgtagaattaattcattgtgggactcgtgagcaagtggcagacatcttgacaaaacctttgaagttggaatcatttacaaggctacgtgatctgttgggaatgcagagcatcaaaactataaactgacttgttagcaagtgcagtttaggggaggatatgttggaaaccagttgttttcgttagaataaagctcctgtcttttaggagccagtaagttagtttgttagtgcaagtcagtatagtttgttagtgctgactatgactaagtcattgttttgtaatttttctgttgttctgttaccacaatcttcggctaagaagatgtggtttgtttttccctgattccaagttgtaatggttatttaagccaaaggaacactactgaataaagtgtattttcacagttaaattgtgcaagatctttgatattataacaattggtatcagagcctcttaacaaggcctgactgtgaatacaagagtgaaaagaaagatttgagtgtttctttaaaatgacagaaggaagcagcaacagctatgtgcctaagtttgtgggacactatgatcattgggctgaactgatggaaaatctgcttcgttccaaagagtattggaatgttgtagatcgtggcatcatggtggatgtcacaggagaagcaaggtctttctcctcagtcgtatcagaaagtcgtccactcacagatgttcaaaggaaggagtatgaagaaaacaagctaaaagatttaaaggcaaagaatcttttgtatcaagcaattgaacgagacatgcttgaaaccattcttgacagaagctcttcaaannnnnnnnnnnnnnnnnnnnnnnnnnnnnnnnnnnnnnnnnnnnnnnnnnacttctactaatggcttacgttcaggacaagaaaacaagcaaagaagaggtctggtttctagactcaggatgctctaatcacatgtcaggaaataaagattggtttatagaaatggatgagcagttcagacactcagtcaagctgggcaatggagcaaaaatgatggtgatgggtaaaggaagtgttaaacttgtgactgcaggactaactcaagtagtaagagatgtatttttcattcctgagcttaagaacaacctattaagcattggacagcttcaagagaagggacttgctattgttatgaaggataaggcttgtaaaatatatcatcctacgagaggccttattatgcaaactcttatggcagcaaataggatgtttattttactagccactatgattactcaaccttcaaactgtttaatagcaagtatggatgacttatcagacctgtggcatcgtcgctatggccatgtgaacaacaagagtctcaaaaccttggagagcaaacaacttgtcaaaggccttccaaaattcaaagcaacaaacacagcatgcacagtgtgtcatcgtggcaaacaacatcgagcagtcattcccaagaagagtcaatggaaagcttcaagaagacttcaactagtgcatgcagatttgtgtggtccaatcactccaacttcaaacagtttaaaaaggtacttattgtgctttatagatgatttcagcagaaaagcttggatttattttttagccgagaagagtgaaacttttgccatgtttaaagtatttaaaagctttgtggaaaaagaatcagaatgtgatatatgctgtttgaggacagacaggggaggagagtttacttccaaagaattcaatgtgttttgtgttaatcatggcatcaagaggcaacttactactgcctacactcctcaacagaatggagtggcagaacgtaaaaatcgaactatattaaacatggttcgatgcctgctttcagagaaggaaatgcctaaactgttctggccagaagcagttcgatggggactgcatgtgttaaataggagtctaactgtggctgtcaaagaaaagactcctgaagagtgttggagtggaaacaaacccaatgttgagtactttagaattttcggctgtattgcaaatgtgcatattcctgacagagggaggataaagttagatgagaagagtcatagatgtgtgtttataggtgttagtgaagaatctaaagcctatcggctttatgatcctaagaccaaaaaggtgattgttagtagggatgtagtgtttgatgagaatgagggctggaattggaggaagagtgatgatggtgtgagtgatatttttacttgggaagatacagataatgatggagaaattagtgattatgatgagaaatcagtagaaggagatgatttgggtacagagggagttgaaaatgataatgaaatagaaggtggaaatgatgatactgtattaggggagaatgttgaggtactggaagatgaagatggtgacacttcaggggaaaatggtcttgctgcaccagaaaatgatacaccaggggaaaataattcttctatatctcaaggaagaattaaacggacacctagatggatggatgattatgttcatggagctggttttcctgacgactcaatgtgctttatggtacatgatgatccaatatgctttgatgaagcagtaaaacagaagaaatggaggaaagccatggatttggaaatggaagctatagtaaagaacaagacatgggagctagtgattccaccagaagggataaagagaattggtgtaaaatggatttttcgaaccaagctgaatgaaaagggagaggtagataaatgcaaagcacacttggtagtaaaaggatatgctcagagacatgggatcgactacagtgaagtttttgcacctgtggctcgttgggacaccataaggctaatcttagctttagcagcatagaaaggatggactgttttccagctagacgtcaagagtgcatttcttcatggggaattagaggaagctgtctatgtggagcagccagaaggctatgttagcaaaggagaagagcataaagtgttgaaacttaaaaaagctctttacggcttgaaacaggctccaagagcctggtatagtagaattgaagggttcttcatgaaggaaggctttgagaaatgcagtcatgaacacacactgtttcttaaacatacagatggaggtaaatgcttaattattagcctttatgtagacgatttaatttatacaggacatgatgtggagctatgtgagaaattcaaggaatcaatgaaactagaatttgatatgagtgatttggggaaaatgaagtattcttaggagtagaggttnnnnnnnnnnnnnnnnnnnnnnnnnnnnnnnnnnnnnnnnnnnnnnnnnnnnnnnnnnnnnnnnnnnnnnnnnnnnnnnnnnnnnnnnnnnnnnnnnnnnnnnnnnnnnnnnnnnnnnnnnnnnnnnnnnnnnnnnnnnnnnnnnnnnnnnnnnnnnnnnnnnnnnnnnnnnnnnnnnnnnnnnnnnnnnnnnnnnnnnnnnnnnnnnnnnnnnnnnnnnnnnnnnnnnnnnnnnnnnnnnnnnnnnnnnnnnnnnnnnnnnnnnnnnnnnnnnnnnnnnnnnnnnnnnnnnnnnnnnnnnnnnnnnnnnnnnnnnnnnnnnnnnnnnnnnnnnnnnnnnnnnnnnnnnnnnnnnnnnnnnnnnnnnnnnnnnnnnnnnnnnnnnnnnnnnnnnnnnnnnnnnnnnnnnnnnnnnnnnnnnnnnnnnnnnnnnnnnnnnnnnnnnnnnnnnnnnnnnnnnnnnnnnnnnnnnnnnnnnnnnnnnnnnnnnnnnnnnnnnnnnnnnnnnnnnnnnnnnnnnnnnnnnnnnnnnnnnnnnnnnnnnnnnnnnnnnnnnnnnnnnnnnnnnnnnnnnnnnnnnnnnnnnnnnnnnnnnnnnnnnnnnnnnnnnnnnnnnnnnnnnnnnnnnnnnnnnnnnnnnnnnnnnnnnnnnnnnnnnnnnnnnnnnnnnnnnnnnnnnnnnnnnnnnnnnnnnnnnnnnnnnnnnnnnnnnnnnnnnnnnnnnnnnnnnnnnnnnnnnnnnnnnnnnnnnnnnnnnnnnnnnnnnnnnnnnnnnnnnnnnnnnnnnnnnnnnnnnnnnnnnnnnnnnnnnnnnnnnnnnnnnnnnnnnnnnnnnnnnnnnnnnnnnnnnnnnnnnnnnnnnnnnnnnnnnnnnnnnnnnnnnnnnnnnnnnnnnnnnnnnnnnnnnnnnnnnnnnnnnnnnnnnnnnnnnnnnnnnnnnnnnnnnnnnnnnnnnnnnnnnnnnnnnnnnnnnnnnnnnnnnnnnnnnnnnnnnnnnnnnnnnnnnnnnnnnnnnnnnnnnnnnnnnnnnnnnnnnnnnnnnnnnnnnnnnnnnnnnnnnnnnnnnnnnnnnnnnnnnnnnnnnnnnnnnnnnnnnnnnnnnnnnnnnnnnnnnnnnnnnnnnnnnnnnnnnnnntggaatcatttacaaggctacgtgatctgttgggaatgcagagcatcaaaactataaactgacttgttagcaagtgcagtttaggggaggatatgttggaaaccagttgttttcgttagaataaagctcctgtctttcaggagccagtaagttagtttgttagtgcaagtcagtatagtttgttagtgctgactatgactaagtcattgttttgtaatttttctgttgttctgttaccacaatcttcggctaagaagatgtggtttgtttttccctgattccaagttgtaatggctatttaagccaaaggaacactactgaataaagtgtattttcacagttaaattgtgcaagatctttgatattataacaagtttcagtgggtcgataaagaacgggtcaggctcggtgtggagctggcctcttggcctgttgggtttggtggttaattagttaatcgattaatcaattagttccctgactggttaattgcctgattgtaagataccgttcgccggtgctctgcattttgttttcttttgcggaaaaaaaaaaacattcgcctagtaatttcactcatctactccggaaacaactctggtattttagaattttccatcatttttaattatgtccacttaaattaagtaatttttattaattagcaatcatataaaaattagtatttaaatgatttaaaaaaataagnnnnnnnnnnnnnnnnnnnnnnnnnnnnnnnnnnnnnnnnnnnnnnnnnnnnnnnnnnnnnnnnnnnnnnnnnnnnnnnnnnnnnnnnnnnnnnnnnnnnnnnnnnnnnnnnnnnnnnnnnnnnnnnnnnnnnnnnnnnnnnnnnnnnnnnnnnnnnnnnnnnnnnnnnnnnnnnnnnnnnnnnnnnnnnnnnnnnnnnnnnnnnnnnnnnnnnnnnnnnnnnnnnnnnnnnnnnnnnnnnnnnnnnnnnnnnnnnnnnnnnnnnnnnnnnnnnnnnnnnnnnnnnnnnnnnnnnnnnnnnnnnnnnnnnnnnnnnnnnnnnnnnnnnnnnnnnnnnnnnnnnnnnnnnnnnnnnnnnnnnnnnnnnnnnnnnnnnnnnnnnnnnnnnnnnnnnnnnnnnnnnnnnnnnnnnnnnnnnnnnnnnnnnnnnnnnnnnnnnnnnnnnnnnnnnnnnnnnnnnnnnnnnnnnnnnnnnnnnnnnnnnnnnnnnnnnnnnnnnnnnnnnnnnnnnnnnnnnnnnnnnnnnnnnnnnnnnnnnnnnnnnnnnnnnnnnnnnnnnnnnnnnnnnnnnnnnnnnnnnnnnnnnnnnnnnnnnnnnnnnnnnnnnnnnnnnnnnnnnnnnnnnnnnnnnnnnnnnnnnnnnnnnnnnnnnnnnnnnnnnnnnnnnnnnnnnnnnnnnnnnnnnnnnnnnnnnnnnnnnnnnnnnnnnnnnnnnnnnnnnnnnnnnnnnnnnnnnnnnnnnnnnnnnnnnnnnnnnnnnnnnnnnnnnnnnnnnnnnnnnnnnnnnnnnnnnnnnnnnnnnnnnnnnnnnnnnnnnnnnnnnnnnnnnnnnnnnnnnnnnnnnnnnnnnnnnnnnnnnnnnnnnnnnnnnnnnnnnnnnnnnnnnnnnnnnnnnnnnnnnnnnnnnnnnnnnnnnnnnnnnnnnnnnnnnnnnnnnnnnnnnnnnnnnnnnnnnnnnnnnnnnnnnnnnnnnnnnnnnnnnnnnnnnnnnnnnnnnnnnnnnnnnnnnnnnnnnnnnnnnnnnnnnnnnnnnnnnnnnnnnnnnnnnnnnnnnnnnnnnnnnnnnnnnnnnnnnnnnnnnnnnnnnnnnnnnnnnnnnnnnnnnnnnnnnnnnnnnnnnnnnnnnnnnnnnnnnnnnnnnnnnnnnnnnnnnnnnnnnnnnnnnnnnnnnnnnnnnnnnnnnnnnnnnnnnnnnnnnnnnnnnnnnnnnnnnnnnnnnnnnnnnnnnnnnnnnnnnnnnnnnnnnnnnnnnnnnnnnnnnnnnnnnnnnnnnnnnnnnnnnnnnnnnnnnnnnnnnnnnnnnnnnnnnnnnnnnnnnnnnnnnnnnnnnnnnnnnnnnnnnnnnnnnnnnnnnnnnnnnnnnnnnnnnnnnnnnnnnnnnnnnnnnnnnnnnnnnnnnnnnnnnnnnnnnnnnnnnnnnnnnnnnnnnnnnnnnnnnnnnnnnnnnnnnnnnnnnnnnnnnnnnnnnnnnnnnnnnnnnnnnnnnnnnnnnnnnnnnnnnnnnnnnnnnnnnnnnnnnnnnnnnnnnnnnnnnnnnnnnnnnnnnnnnnnnnnnnnnnnnnnnnnnnnnnnnnnnnnnnnnnnnnnnnnnnnnnnnnnnnnnnnnnnnnnnnnnnnnnnnnnnnnnnnnnnnnnnnnnnnnnnnnnnnnnnnnnnnnnnnnnnnnnnnnnnnnnnnnnnnnnnnnnnnnnnnnnnnnnnnnnnnnnnnnnnnnnnnnnnnnnnnnnnnnnnnnnnnnnnnnnnnnnnnnnnnnnnnnnnnnnnnnnnnnnnnnnnnnnnnnnnnnnnnnnnnnnnnnnnnnnnnnnnnnnnnnnnnnnnnnnnnnnnnnnnnnnnnnnnnnnnnnnnnnnnnnnnnnnnnnnnnnnnnnnnnnnnnnnnnnnnnnnnnnnnnnnnnnnnnnnnnnnnnnnnnnnnnnnnnnnnnnnnnnnnnnnnnnnnnnnnnnnnnnnnnnnnnnnnnnnnnnnnnnnnnnnnnnnnnnnnnnnnnnnnnnnnnnnnnnnnnnnnnnnnnnnnnnnnnnnnnnnnnnnnnnnnnnnnnnnnnnnnnnnnnnnnnnnnnnnnnnnnnnnnnnnnnnnnnnnnnnnnnnnnnnnnnnnnnnnnnnnnnnnnnnnnnnnnnnnnnnnnnnnnnnnnnnnnnnnnnnnnnnnnnnnnnnnnnnnnnnnnnnnnnnnnnnnnnnnnnnnnnnnnnnnnnnnnnnnnnnnnnnnnnnnnnnnnnnnnnnnnnnnnnnnnnnnnnnnnnnnnnnnnnnnnnnnnnnnnnnnnnnnnnnnnnnnnnnnnnnnnnnnnnnnnnnnnnnnnnnnnnnnnnnnnnnnnnnnnnnnnnnnnnnnnnnnnnnnnnnnnnnnnnnnnnnnnnnnnnnnnnnnnnnnnnnnnnnnnnnnnnnnnnnnnnnnnnnnnnnnnnnnnnnnnnnnnnnnnnnnnnnnnnnnnnnnnnnnnnnnnnnnnnnnnnnnnnnnnnnnnnnnnnnnnnnnnnnnnnnnnnnnnnnnnnnnnnnnnnnnnnnnnnnnnnnnnnnnnnnnnnnnnnnnnnnnnnnnnnnnnnnnnnnnnnnnnnnnnnnnnnnnnnnnnnnnnnnnnnnnnnnnnnnnnnnnnnnnnnnnnnnnnnnnnnnnnnnnnnnnnnnnnnnnnnnnnnnnnnnnnnnnnnnnnnnnnnnnnnnnnnnnnnnnnnnnnnnnnnnnnnnnnnnnnnnnnnnnnnnnnnnnnnnnnnnnnnnnnnnnnnnnnnnnnnnnnnnnnnnnnnnnnnnnnnnnnnnnnnnnnnnnnnnnnnnnnnnnnnnnnnnnnnnnnnnnnnnnnnnnnnnnnnnnnnnnnnnnnnnnnnnnnnnnnnnnnnnnnnnnnnnnnnnnnnnnnnnnnnnnnnnnnnnnnnnnnnnnnnnnnnnnnnnnnnnnnnnnnnnnnnnnnnnnnnnnnnnnnnnnnnnnnnnnnnnnnnnnnnnnnnnnnnnnnnnnnnnnnnnnnnnnnnnnnnnnnnnnnnnnnnnnnnnnnnnnnnnnnnnnnnnnnnnnnnnnnnnnnnnnnnnnnnnnnnnnnnnnnnnnnnnnnnnnnnnnnnnnnnnnnnnnnnnnnnnnnnnnnnnnnnnnnnnnnnnnnnnnnnnnnnnnnnnnnnnnnnnnnnnnnnnnnnnnnnnnnnnnnnnnnnnnnnnnnnnnnnnnnnnnnnnnnnnnnnnnnnnnnnnnnnnnnnnnnnnnnnnnnnnnnnnnnnnnnnnnnnnnnnnnnnnnnnnnnnnnnnnnnnnnnnnnnnnnnnnnnnnnnnnnnnnnnnnnnnnnnnnnnnnnnnnnnnnnnnnnnnnnnnnnnnnnnnnnnnnnnnnnnnnnnnnnnnnnnnnnnnnnnnnnnnnnnnnnnnnnnnnnnnnnnnnnnnnnnnnnnnnnnnnnnnnnnnnnnnnnnnnnnnnnnnnnnnnnnnnnnnnnnnnnnnnnnnnnnnnnnnnnnnnnnnnnnnnnnnnnnnnnnnnnnnnnnnnnnnnnnnnnnnnnnnnnnnnnnnnnnnnnnnnnnnnnnnnnnnnnnnnnnnnnnnnnnnnnnnnnnnnnnnnnnnnnnnnnnnnnnnnnnnnnnnnnnnnnnnnnnnnnnnnnnnnnnnnnnnnnnnnnnnnnnnnnnnnnnnnnnnnnnnnnnnnnnnnnnnnnnnnnnnnnnnnnnnnnnnnnnnnnnnnnnnnnnnnnnnnnnnnnnnnnnnnnnnnnnnnnnnnnnnnnnnnnnnnnnnnnnnnnnnnnnnnnnnnnnnnnnnnnnnnnnnnnnnnnnnnnnnnnnnnnnnnnnnnnnnnnnnnnnnnnnnnnnnnnnnnnnnnnnnnnnnnnnnnnnnnnnnnnnnnnnnnnnnnnnnnnnnnnnnnnnnnnnnnnnnnnnnnnnnnnnnnnnnnnnnnnnnnnnnnnnnnnnnnnnnnnnnnnnnnnnnnnnnnnnnnnnnnnnnnnnnnnnnnnnnnnnnnnnnnnnnnnnnnnnnnnnnnnnnnnnnnnnnnnnnnnnnnnnnnnnnnnnnnnnnnnnnnnnnnnnnnnnnnnnnnnnnnnnnnnnnnnnnnnnnnnnnnnnnnnnnnnnnnnnnnnnnnnnnnnnnnnnnnnnnnnnnnnnnnnnnnnnnnnnnnnnnnnnnnnnnnnnnnnnnnnnnnnnnnnnnnnnnnnnnnnnnnnnnnnnnnnnnnnnnnnnnnnnnnnnnnnnnnnnnnnnnnnnnnnnnnnnnnnnnnnnnnnnnnnnnnnnnnnnnnnnnnnnnnnnnnnnnnnnnnnnnnnnnnnnnnnnnnnnnnnnnnnnnnnnnnnnnnnnnnnnnnnnnnnnnnnnnnnnnnnnnnnnnnnnnnnnnnnnnnnnnnnnnnnnnnnnnnnnnnnnnnnnnnnnnnnnnnnnnnnnnnnnnnnnnnnnnnnnnnnnnnnnnnnnnnnnnnnnnnnnnnnnnnnnnnnnnnnnnnnnnnnnnnnnnnnnnnnnnnnnnnnnnnnnnnnnnnnnnnnnnnnnnnnnnnnnnnnnnnnnnnnnnnnnnnnnnnnnnnnnnnnnnnnnnnnnnnnnnnnnnnnnnnnnnnnnnnnnnnnnnnnnnnnnnnnnnnnnnnnnnnnnnnnnnnnnnnnnnnnnnnnnnnnnnnnnnnnnnnnnnnnnnnnnnnnnnnnnnnnnnnnnnnnnnnnnnnnnnnnnnnnnnnnnnnnnnnnnnnnnnnnnnnnnnnnnnnnnnnnnnnnnnnnnnnnnnnnnnnnnnnnnnnnnnnnnnnnnnnnnnnnnnnnnnnnnnnnnnnnnnnnnnnnnnnnnnnnnnnnnnnnnnnnnnnnnnnnnnnnnnnnnnnnnnnnnnnnnnnnnnnnnnnnnnnnnnnnnnnnnnnnnnnnnnnnnnnnnnnnnnnnnnnnnnnnnnnnnnnnnnnnnnnnnnnnnnnnnnnnnnnnnnnnnnnnnnnnnnnnnnnnnnnnnnnnnnnnnnnnnnnnnnnnnnnnnnnnnnnnnnnnnnnnnnnnnnnnnnnnnnnnnnnnnnnnnnnnnnnnnnnnnnnnnnnnnnnnnnnnnnnnnnnnnnnnnnnnnnnnnnnnnnnnnnnnnnnnnnnnnnnnnnnnnnnnnnnnnnnnnnnnnnnnnnnnnnnnnnnnnnnnnnnnnnnnnnnnnnnnnnnnnnnnnnnnnnnnnnnnnnnnnnnnnnnnnnnnnnnnnnnnnnnnnnnnnnnnnnnnnnnnnnnnnnnnnnnnnnnnnnnnnnnnnnnnnnnnnnnnnnnnnnnnnnnnnnnnnnnnnnnnnnnnnnnnnnnnnnnnnnnnnnnnnnnnnnnnnnnnnnnnnnnnnnnnnnnnnnnnnnnnnnnnnnnnnnnnnnnnnnnnnnnnnnnnnnnnnnnnnnnnnnnnnnnnnnnnnnnnnnnnnnnnnnnnnnnnnnnnnnnnnnnnnnnnnnnnnnnnnnnnnnnnnnnnnnnnnnnnnnnnnnnnnnnnnnnnnnnnnnnnnnnnnnnnnnnnnnnnnnnnnnnnnnnnnnnnnnnnnnnnnnnnnnnnnnnnnnnnnnnnnnnnnnnnnnnnnnnnnnnnnnnnnnnnnnnnnnnnnnnnnnnnnnnnnnnnnnnnnnnnnnnnnnnnnnnnnnnnnnnnnnnnnnnnnnnnnnnnnnnnnnnnnnnnnnnnnnnnnnnnnnnnnnnnnnnnnnnnnnnnnnnnnnnnnnnnnnnnnnnnnnnnnnnnnnnnnnnnnnnnnnnnnnnnnnnnnnnnnnnnnnnnnnnnnnnnnnnnnnnnnnnnnnnnnnnnnnnnnnnnnnnnnnnnnnnnnnnnnnnnnnnnnnnnnnnnnnnnnnnnnnnnnnnnnnnnnnnnnnnnnnnnnnnnnnnnnnnnnnnnnnnnnnnnnnnnnnnnnnnnnnnnnnnnnnnnnnnnnnnnnnnnnnnnnnnnnnnnnnnnnnnnnnnnnnnnnnnnnnnnnnnnnnnnnnnnnnnnnnnnnnnnnnnnnnnnnnnnnnnnnnnnnnnnnnnnnnnnnnnnnnnnnnnnnnnnnnnnnnnnnnnnnnnnnnnnnnnnnnnnnnnnnnnnnnnnnnnnnnnnnnnnnnnnnnnnnnnnnnnnnnnnnnnnnnnnnnnnnnnnnnnnnnnnnnnnnnnnnnnnnnnnnnnnnnnnnnnnnnnnnnnnnnnnnnnnnnnnnnnnnnnnnnnnnnnnnnnnnnnnnnnnnnnnnnnnnnnnnnnnnnnnnnnnnnnnnnnnnnnnnnnnnnnnnnnnnnnnnnnnnnnnnnnnnnnnnnnnnnnnnnnnnnnnnnnnnnnnnnnnnnnnnnnnnnnnnnnnnnnnnnnnnnnnnnnnnnnnnnnnnnnnnnnnnnnnnnnnnnnnnnnnnnnnnnnnnnnnnnnnnnnnnnnnnnnnnnnnnnnnnnnnnnnnnnnnnnnnnnnnnnnnnnnnnnnnnnnnnnnnnnnnnnnnnnnnnnnnnnnnnnnnnnnnnnnnnnnnnnnnnnnnnnnnnnnnnnnnnnnnnnnnnnnnnnnnnnnnnnnnnnnnnnnnnnnnnnnnnnnnnnnnnnnnnnnnnnnnnnnnnnnnnnnnnnnnnnnnnnnnnnnnnnnnnnnnnnnnnnnnnnnnnnnnnnnnnnnnnnnnnnnnnnnnnnnnnnnnnnnnnnnnnnnnnnnnnnnnnnnnnnnnnnnnnnnnnnnnnnnnnnnnnnnnnnnnnnnnnnnnnnnnnnnnnnnnnnnnnnnnnnnnnnnnnnnnnnnnnnnnnnnnnnnnnnnnnnnnnnnnnnnnnnnnnnnnnnnnnnnnnnnnnnnnnnnnnnnnnnnnnnnnnnnnnnnnnnnnnnnnnnnnnnnnnnnnnnnnnnnnnnnnnnnnnnnnnnnnnnnnnnnnnnnnnnnnnnnnnnnnnnnnnnnnnnnnnnnnnnnnnnnnnnnnnnnnnnnnnnnnnnnnnnnnnnnnnnnnnnnnnnnnnnnnnnnnnnnnnnnnnnnnnnnnnnnnnnnnnnnnnnnnnnnnnnnnnnnnnnnnnnnnnnnnnnnnnnnnnnnnnnnnnnnnnnnnnnnnnnnnnnnnnnnnnnnnnnnnnnnnnnnnnnnnnnnnnnnnnnnnnnnnnnnnnnnnnnnnnnnnnnnnnnnnnnnnnnnnnnnnnnnnnnnnnnnnnnnnnnnnnnnnnnnnnnnnnnnnnnnnnnnnnnnnnnnnnnnnnnnnnnnnnnnnnnnnnnnnnnnnnnnnnnnnnnnnnnnnnnnnnnnnnnnnnnnnnnnnnnnnnnnnnnnnnnnnnnnnnnnnnnnnnnnnnnnnnnnnnnnnnnnnnnnnnnnnnnnnnnnnnnnnnnnnnnnnnnnnnnnnnnnnnnnnnnnnnnnnnnnnnnnnnnnnnnnnnnnnnnnnnnnnnnnnnnnnnnnnnnnnnnnnnnnnnnnnnnnnnnnnnnnnnnnnnnnnnnnnnnnnnnnnnnnnnnnnnnnnnnnnnnnnnnnnnnnnnnnnnnnnnnnnnnnnnnnnnnnnnnnnnnnnnnnnnnnnnnnnnnnnnnnnnnnnnnnnnnnnnnnnnnnnnnnnnnnnnnnnnnnnnnnnnnnnnnnnnnnnnnnnnnnnnnnnnnnnnnnnnnnnnnnnnnnnnnnnnnnnnnnnnnnnnnnnnnnnnnnnnnnnnnnnnnnnnnnnnnnnnnnnnnnnnnnnnnnnnnnnnnnnnnnnnnnnnnnnnnnnnnnnnnnnnnnnnnnnnnnnnnnnnnnnnnnnnnnnnnnnnnnnnnnnnnnnnnnnnnnnnnnnnnnnnnnnnnnnnnnnnnnnnnnnnnnnnnnnnnnnnnnnnnnnnnnnnnnnnnnnnnnnnnnnnnnnnnnnnnnnnnnnnnnnnnnnnnnnnnnnnnnnnnnnnnnnnnnnnnnnnnnnnnnnnnnnnnnnnnnnnnnnnnnnnnnnnnnnnnnnnnnnnnnnnnnnnnnnnnnnnnnnnnnnnnnnnnnnnnnnnnnnnnnnnnnnnnnnnnnnnnnnnnnnnnnnnnnnnnnnnnnnnnnnnnnnnnnnnnnnnnnnnnnnnnnnnnnnnnnnnnnnnnnnnnnnnnnnnnnnnnnnnnnnnnnnnnnnnnnnnnnnnnnnnnnnnnnnnnnnnnnnnnnnnnnnnnnnnnnnnnnnnnnnnnnnnnnnnnnnnnnnnnnnnnnnnnnnnnnnnnnnnnnnnnnnnnnnnnnnnnnnnnnnnnnnnnnnnnnnnnnnnnnnnnnnnnnnnnnnnnnnnnnnnnnnnnnnnnnnnnnnnnnnnnnnnnnnnnnnnnnnnnnnnnnnnnnnnnnnnnnnnnnnnnnnnnnnnnnnnnnnnnnnnnnnnnnnnnnnnnnnnnnnnnnnnnnnnnnnnnnnnnnnnnnnnnnnnnnnnnnnnnnnnnnnnnnnnnnnnnnnnnnnnnnnnnnnnnnnnnnnnnnnnnnnnnnnnnnnnnnnnnnnnnnnnnnnnnnnnnnnnnnnnnnnnnnnnnnnnnnnnnnnnnnnnnnnnnnnnnnnnnnnnnnnnnnnnnnnnnnnnnnnnnnnnnnnnnnnnnnnnnnnnnnnnnnnnnnnnnnnnnnnnnnnnnnnnnnnnnnnnnnnnnnnnnnnnnnnnnnnnnnnnnnnnnnnnnnnnnnnnnnnnnnnnnnnnnnnnnnnnnnnnnnnnnnnnnnnnnnnnnnnnnnnnnnnnnnnnnnnnnnnnnnnnnnnnnnnnnnnnnnnnnnnnnnnnnnnnnnnnnnnnnnnnnnnnnnnnnnnnnnnnnnnnnnnnnnnnnnnnnnnnnnnnnnnnnnnnnnnnnnnnnnnnnnnnnnnnnnnnnnnnnnnnnnnnnnnnnnnnnnnnnnnnnnnnnnnnnnnnnnnnnnnnnnnnnnnnnnnnnnnnnnnnnnnnnnnnnnnnnnnnnnnnnnnnnnnnnnnnnnnnnnnnnnnnnnnnnnnnnnnnnnnnnnnnnnnnnnnnnnnnnnnnnnnnnnnnnnnnnnnnnnnnnnnnnnnnnnnnnnnnnnnnnnnnnnnnnnnnnnnnnnnnnnnnnnnnnnnnnnnnnnnnnnnnnnnnnnnnnnnnnnnnnnnnnnnnnnnnnnnnnnnnnnnnnnnnnnnnnnnnnnnnnnnnnnnnnnnnnnnnnnnnnnnnnnnnnnnnnnnnnnnnnnnnnnnnnnnnnnnnnnnnnnnnnnnnnnnnnnnnnnnnnnnnnnnnnnnnnnnnnnnnnnnnnnnnnnnnnnnnnnnnnnnnnnnnnnnnnnnnnnnnnnnnnnnnnnnnnnnnnnnnnnnnnnnnnnnnnnnnnnnnnnnnnnnnnnnnnnnnnnnnnnnnnnnnnnnnnnnnnnnnnnnnnnnnnnnnnnnnnnnnnnnnnnnnnnnnnnnnnnnnnnnnnnnnnnnnnnnnnnnnnnnnnnnnnnnnnnnnnnnnnnnnnnnnnnnnnnnnnnnnnnnnnnnnnnnnnnnnnnnnnnnnnnnnnnnnnnnnnnnnnnnnnnnnnnnnnnnnnnnnnnnnnnnnnnnnnnnnnnnnnnnnnnnnnnnnnnnnnnnnnnnnnnnnnnnnnnnnnnnnnnnnnnnnnnnnnnnnnnnnnnnnnnnnnnnnnnnnnnnnnnnnnnnnnnnnnnnnnnnnnnnnnnnnnnnnnnnnnnnnnnnnnnnnnnnnnnnnnnnnnnnnnnnnnnnnnnnnnnnnnnnnnnnnnnnnnnnnnnnnnnnnnnnnnnnnnnnnnnnnnnnnnnnnnnnnnnnnnnnnnnnnnnnnnnnnnnnnnnnnnnnnnnnnnnnnnnnnnnnnnnnnnnnnnnnnnnnnnnnnnnnnnnnnnnnnnnnnnnnnnnnnnnnnnnnnnnnnnnnnnnnnnnnnnnnnnnnnnnnnnnnnnnnnnnnnnnnnnnnnnnnnnnnnnnnnnnnnnnnnnnnnnnnnnnnnnnnnnnnnnnnnnnnnnnnnnnnnnnnnnnnnnnnnnnnnnnnnnnnnnnnnnnnnnnnnnnnnnnnnnnnnnnnnnnnnnnnnnnnnnnnnnnnnnnnnnnnnnnnnnnnnnnnnnnnnnnnnnnnnnnnnnnnnnnnnnnnnnnnnnnnnnnnnnnnnnnnnnnnnnnnnnnnnnnnnnnnnnnnnnnnnnnnnnnnnnnnnnnnnnnnnnnnnnnnnnnnnnnnnnnnnnnnnnnnnnnnnnnnnnnnnnnnnnnnnnnnnnnnnnnnnnnnnnnnnnnnnnnnnnnnnnnnnnnnnnnnnnnnnnnnnnnnnnnnnnnnnnnnnnnnnnnnnnnnnnnnnnnnnnnnnnnnnnnnnnnnnnnnnnnnnnnnnnnnnnnnnnnnnnnnnnnnnnnnnnnnnnnnnnnnnnnnnnnnnnnnnnnnnnnnnnnnnnnnnnnnnnnnnnnnnnnnnnnnnnnnnnnnnnnnnnnnnnnnnnnnnnnnnnnnnnnnnnnnnnnnnnnnnnnnnnnnnnnnnnnnnnnnnnnnnnnnnnnnnnnnnnnnnnnnnnnnnnnnnnnnnnnnnnnnnnnnnnnnnnnnnnnnnnnnnnnnnnnnnnnnnnnnnnnnnnnnnnnnnnnnnnnnnnnnnnnnnnnnnnnnnnnnnnnnnnnnnnnnnnnnnnnnnnnnnnnnnnnnnnnnnnnnnnnnnnnnnnnnnnnnnnnnnnnnnnnnnnnnnnnnnnnnnnnnnnnnnnnnnnnnnnnnnnnnnnnnnnnnnnnnnnnnnnnnnnnnnnnnnnnnnnnnnnnnnnnnnnnnnnnnnnnnnnnnnnnnnnnnnnnnnnnnnnnnnnnnnnnnnnnnnnnnnnnnnnnnnnnnnnnnnnnnnnnnnnnnnnnnnnnnnnnnnnnnnnnnnnnnnnnnnnnnnnnnnnnnnnnnnnnnnnnnnnnnnnnnnnnnnnnnnnnnnnnnnnnnnnnnnnnnnnnnnnnnnnnnnnnnnnnnnnnnnnnnnnnnnnnnnnnnnnnnnnnnnnnnnnnnnnnnnnnnnnnnnnnnnnnnnnnnnnnnnnnnnnnnnnnnnnnnnnnnnnnnnnnnnnnnnnnnnnnnnnnnnnnnnnnnnnnnnnnnnnnnnnnnnnnnnnnnnnnnnnnnnnnnnnnnnnnnnnnnnnnnnnnnnnnnnnnnnnnnnnnnnnnnnnnnnnnnnnnnnnnnnnnnnnnnnnnnnnnnnnnnnnnnnnnnnnnnnnnnnnnnnnnnnnnnnnnnnnnnnnnnnnnnnnnnnnnnnnnnnnnnnnnnnnnnnnnnnnnnnnnnnnnnnnnnnnnnnnnnnnnnnnnnnnnnnnnnnnnnnnnnnnnnnnnnnnnnnnnnnnnnnnnnnnnnnnnnnnnnnnnnnnnnnnnnnnnnnnnnnnnnnnnnnnnnnnnnnnnnnnnnnnnnnnnnnnnnnnnnnnnnnnnnnnnnnnnnnnnnnnnnnnnnnnnnnnnnnnnnnnnnnnnnnnnnnnnnnnnnnnnnnnnnnnnnnnnnnnnnnnnnnnnnnnnnnnnnnnnnnnnnnnnnnnnnnnnnnnnnnnnnnnnnnnnnnnnnnnnnnnnnnnnnnnnnnnnnnnnnnnnnnnnnnnnnnnnnnnnnnnnnnnnnnnnnnnnnnnnnnnnnnnnnnnnnnnnnnnnnnnnnnnnnnnnnnnnnnnnnnnnnnnnnnnnnnnnnnnnnnnnnnnnnnnnnnnnnnnnnnnnnnnnnnnnnnnnnnnnnnnnnnnnnnnnnnnnnnnnnnnnnnnnnnnnnnnnnnnnnnnnnnnnnnnnnnnnnnnnnnnnnnnnnnnnnnnnnnnnnnnnnnnnnnnnnnnnnnnnnnnnnnnnnnnnnnnnnnnnnnnnnnnnnnnnnnnnnnnnnnnnnnnnnnnnnnnnnnnnnnnnnnnnnnnnnnnnnnnnnnnnnnnnnnnnnnnnnnnnnnnnnnnnnnnnnnnnnnnnnnnnnnnnnnnnnnnnnnnnnnnnnnnnnnnnnnnnnnnnnnnnnnnnnnnnnnnnnnnnnnnnnnnnnnnnnnnnnnnnnnnnnnnnnnnnnnnnnnnnnnnnnnnnnnnnnnnnnnnnnnnnnnnnnnnnnnnnnnnnnnnnnnnnnnnnnnnnnnnnnnnnnnnnnnnnnnnnnnnnnnnnnnnnnnnnnnnnnnnnnnnnnnnnnnnnnnnnnnnnnnnnnnnnnnnnnnnnnnnnnnnnnnnnnnnnnnnnnnnnnnnnnnnnnnnnnnnnnnnnnnnnnnnnnnnnnnnnnnnnnnnnnnnnnnnnnnnnnnnnnnnnnnnnnnnnnnnnnnnnnnnnnnnnnnnnnnnnnnnnnnnnnnnnnnnnnnnnnnnnnnnnnnnnnnnnnnnnnnnnnnnnnnnnnnnnnnnnnnnnnnnnnnnnnnnnnnnnnnnnnnnnnnnnnnnnnnnnnnnnnnnnnnnnnnnnnnnnnnnnnnnnnnnnnnnnnnnnnnnnnnnnnnnnnnnnnnnnnnnnnnnnnnnnnnnnnnnnnnnnnnnnnnnnnnnnnnnnnnnnnnnnnnnnnnnnnnnnnnnnnnnnnnnnnnnnnnnnnnnnnnnnnnnnnnnnnnnnnnnnnnnnnnnnnnnnnnnnnnnnnnnnnnnnnnnnnnnnnnnnnnnnnnnnnnnnnnnnnnnnnnnnnnnnnnnnnnnnnnnnnnnnnnnnnnnnnnnnnnnnnnnnnnnnnnnnnnnnnnnnnnnnnnnnnnnnnnnnnnnnnnnnnnnnnnnnnnnnnnnnnnnnnnnnnnnnnnnnnnnnnnnnnnnnnnnnnnnnnnnnnnnnnnnnnnnnnnnnnnnnnnnnnnnnnnnnnnnnnnnnnnnnnnnnnnnnnnnnnnnnnnnnnnnnnnnnnnnnnnnnnnnnnnnnnnnnnnnnnnnnnnnnnnnnnnnnnnnnnnnnnnnnnnnnnnnnnnnnnnnnnnnnnnnnnnnnnnnnnnnnnnnnnnnnnnnnnnnnnnnnnnnnnnnnnnnnnnnnnnnnnnnnnnnnnnnnnnnnnnnnnnnnnnnnnnnnnnnnnnnnnnnnnnnnnnnnnnnnnnnnnnnnnnnnnnnnnnnnnnnnnnnnnnnnnnnnnnnnnnnnnnnnnnnnnnnnnnnnnnnnnnnnnnnnnnnnnnnnnnnnnnnnnnnnnnnnnnnnnnnnnnnnnnnnnnnnnnnnnnnnnnnnnnnnnnnnnnnnnnnnnnnnnnnnnnnnnnnnnnnnnnnnnnnnnnnnnnnnnnnnnnnnnnnnnnnnnnnnnnnnnnnnnnnnnnnnnnnnnnnnnnnnnnnnnnnnnnnnnnnnnnnnnnnnnnnnnnnnnnnnnnnnnnnnnnnnnnnnnnnnnnnnnnnnnnnnnnnnnnnnnnnnnnnnnnnnnnnnnnnnnnnnnnnnnnnnnnnnnnnnnnnnnnnnnnnnnnnnnnnnnnnnnnnnnnnnnnnnnnnnnnnnnnnnnnnnnnnnnnnnnnnnnnnnnnnnnnnnnnnnnnnnnnnnnnnnnnnnnnnnnnnnnnnnnnnnnnnnnnnnnnnnnnnnnnnnnnnnnnnnnnnnnnnnnnnnnnnnnnnnnnnnnnnnnnnnnnnnnnnnnnnnnnnnnnnnnnnnnnnnnnnnnnnnnnnnnnnnnnnnnnnnnnnnnnnnnnnnnnnnnnnnnnnnnnnnnnnnnnnnnnnnnnnnnnnnnnnnnnnnnnnnnnnnnnnnnnnnnnnnnnnnnnnnnnnnnnnnnnnnnnnnnnnnnnnnnnnnnnnnnnnnnnnnnnnnnnnnnnnnnnnnnnnnnnnnnnnnnnnnnnnnnnnnnnnnnnnnnnnnnnnnnnnnnnnnnnnnnnnnnnnnnnnnnnnnnnnnnnnnnnnnnnnnnnnnnnnnnnnnnnnnnnnnnnnnnnnnnnnnnnnnnnnnnnnnnnnnnnnnnnnnnnnnnnnnnnnnnnnnnnnnnnnnnnnnnnnnnnnnnnnnnnnnnnnnnnnnnnnnnnnnnnnnnnnnnnnnnnnnnnnnnnnnnnnnnnnnnnnnnnnnnnnnnnnnnnnnnnnnnnnnnnnnnnnnnnnnnnnnnnnnnnnnnnnnnnnnnnnnnnnnnnnnnnnnnnnnnnnnnnnnnnnnnnnnnnnnnnnnnnnnnnnnnnnnnnnnnnnnnnnnnnnnnnnnnnnnnnnnnnnnnnnnnnnnnnnnnnnnnnnnnnnnnnnnnnnnnnnnnnnnnnnnnnnnnnnnnnnnnnnnnnnnnnnnnnnnnnnnnnnnnnnnnnnnnnnnnnnnnnnnnnnnnnnnnnnnnnnnnnnnnnnnnnnnnnnnnnnnnnnnnnnnnnnnnnnnnnnnnnnnnnnnnnnnnnnnnnnnnnnnnnnnnnnnnnnnnnnnnnnnnnnnnnnnnnnnnnnnnnnnnnnnnnnnnnnnnnnnnnnnnnnnnnnnnnnnnnnnnnnnnnnnnnnnnnnnnnnnnnnnnnnnnnnnnnnnnnnnnnnnnnnnnnnnnnnnnnnnnnnnnnnnnnnnnnnnnnnnnnnnnnnnnnnnnnnnnnnnnnnnnnnnnnnnnnnnnnnnnnnnnnnnnnnnnnnnnnnnnnnnnnnnnnnnnnnnnnnnnnnnnnnnnnnnnnnnnnnnnnnnnnnnnnnnnnnnnnnnnnnnnnnnnnnnnnnnnnnnnnnnnnnnnnnnnnnnnnnnnnnnnnnnnnnnnnnnnnnnnnnnnnnnnnnnnnnnnnnnnnnnnnnnnnnnnnnnnnnnnnnnnnnnnnnnnnnnnnnnnnnnnnnnnnnnnnnnnnnnnnnnnnnnnnnnnnnnnnnnnnnnnnnnnnnnnnnnnnnnnnnnnnnnnnnnnnnnnnnnnnnnnnnnnnnnnnnnnnnnnnnnnnnnnnnnnnnnnnnnnnnnnnnnnnnnnnnnnnnnnnnnnnnnnnnnnnnnnnnnnnnnnnnnnnnnnnnnnnnnnnnnnnnnnnnnnnnnnnnnnnnnnnnnnnnnnnnnnnnnnnnnnnnnnnnnnnnnnnnnnnnnnnnnnnnnnnnnnnnnnnnnnnnnnnnnnnnnnnnnnnnnnnnnnnnnnnnnnnnnnnnnnnnnnnnnnnnnnnnnnnnnnnnnnnnnnnnnnnnnnnnnnnnnnnnnnnnnnnnnnnnnnnnnnnnnnnnnnnnnnnnnnnnnnnnnnnnnnnnnnnnnnnnnnnnnnnnnnnnnnnnnnnnnnnnnnnnnnnnnnnnnnnnnnnnnnnnnnnnnnnnnnnnnnnnnnnnnnnnnnnnnnnnnnnnnnnnnnnnnnnnnnnnnnnnnnnnnnnnnnnnnnnnnnnnnnnnnnnnnnnnnnnnnnnnnnnnnnnnnnnnnnnnnnnnnnnnnnnnnnnnnnnnnnnnnnnnnnnnnnnnnnnnnnnnnnnnnnnnnnnnnnnnnnnnnnnnnnnnnnnnnnnnnnnnnnnnnnnnnnnnnnnnnnnnnnnnnnnnnnnnnnnnnnnnnnnnnnnnnnnnnnnnnnnnnnnnnnnnnnnnnnnnnnnnnnnnnnnnnnnnnnnnnnnnnnnnnnnnnnnnnnnnnnnnnnnnnnnnnnnnnnnnnnnnnnnnnnnnnnnnnnnnnnnnnnnnnnnnnnnnnnnnnnnnnnnnnnnnnnnnnnnnnnnnnnnnnnnnnnnnnnnnnnnnnnnnnnnnnnnnnnnnnnnnnnnnnnnnnnnnnnnnnnnnnnnnnnnnnnnnnnnnnnnnnnnnnnnnnnnnnnnnnnnnnnnnnnnnnnnnnnnnnnnnnnnnnnnnnnnnnnnnnnnnnnnnnnnnnnnnnnnnnnnnnnnnnnnnnnnnnnnnnnnnnnnnnnnnnnnnnnnnnnnnnnnnnnnnnnnnnnnnnnnnnnnnnnnnnnnnnnnnnnnnnnnnnnnnnnnnnnnnnnnnnnnnnnnnnnnnnnnnnnnnnnnnnnnnnnnnnnnnnnnnnnnnnnnnnnnnnnnnnnnnnnnnnnnnnnnnnnnnnnnnnnnnnnnnnnnnnnnnnnnnnnnnnnnnnnnnnnnnnnnnnnnnnnnnnnnnnnnnnnnnnnnnnnnnnnnnnnnnnnnnnnnnnnnnnnnnnnnnnnnnnnnnnnnnnnnnnnnnnnnnnnnnnnnnnnnnnnnnnnnnnnnnnnnnnnnnnnnnnnnnnnnnnnnnnnnnnnnnnnnnnnnnnnnnnnnnnnnnnnnnnnnnnnnnnnnnnnnnnnnnnnnnnnnnnnnnnnnnnnnnnnnnnnnnnnnnnnnnnnnnnnnnnnnnnnnnnnnnnnnnnnnnnnnnnnnnnnnnnnnnnnnnnnnnnnnnnnnnnnnnnnnnnnnnnnnnnnnnnnnnnnnnnnnnnnnnnnnnnnnnnnnnnnnnnnnnnnnnnnnnnnnnnnnnnnnnnnnnnnnnnnnnnnnnnnnnnnnnnnnnnnnnnnnnnnnnnnnnnnnnnnnnnnnnnnnnnnnnnnnnnnnnnnnnnnnnnnnnnnnnnnnnnnnnnnnnnnnnnnnnnnnnnnnnnnnnnnnnnnnnnnnnnnnnnnnnnnnnnnnnnnnnnnnnnnnnnnnnnnnnnnnnnnnnnnnnnnnnnnnnnnnnnnnnnnnnnnnnnnnnnnnnnnnnnnnnnnnnnnnnnnnnnnnnnnnnnnnnnnnnnnnnnnnnnnnnnnnnnnnnnnnnnnnnnnnnnnnnnnnnnnnnnnnnnnnnnnnnnnnnnnnnnnnnnnnnnnnnnnnnnnnnnnnnnnnnnnnnnnnnnnnnnnnnnnnnnnnnnnnnnnnnnnnnnnnnnnnnnnnnnnnnnnnnnnnnnnnnnnnnnnnnnnnnnnnnnnnnnnnnnnnnnnnnnnnnnnnnnnnnnnnnnnnnnnnnnnnnnnnnnnnnnnnnnnnnnnnnnnnnnnnnnnnnnnnnnnnnnnnnnnnnnnnnnnnnnnnnnnnnnnnnnnnnnnnnnnnnnnnnnnnnnnnnnnnnnnnnnnnnnnnnnnnnnnnnnnnnnnnnnnnnnnnnnnnnnnnnnnnnnnnnnnnnnnnnnnnnnnnnnnnnnnnnnnnnnnnnnnnnnnnnnnnnnnnnnnnnnnnnnnnnnnnnnnnnnnnnnnnnnnnnnnnnnnnnnnnnnnnnnnnnnnnnnnnnnnnnnnnnnnnnnnnnnnnnnnnnnnnnnnnnnnnnnnnnnnnnnnnnnnnnnnnnnnnnnnnnnnnnnnnnnnnnnnnnnnnnnnnnnnnnnnnnnnnnnnnnnnnnnnnnnnnnnnnnnnnnnnnnnnnnnnnnnnnnnnnnnnnnnnnnnnnnnnnnnnnnnnnnnnnnnnnnnnnnnnnnnnnnnnnnnnnnnnnnnnnnnnnnnnnnnnnnnnnnnnnnnnnnnnnnnnnnnnnnnnnnnnnnnnnnnnnnnnnnnnnnnnnnnnnnnnnnnnnnnnnnnnnnnnnnnnnnnnnnnnnnnnnnnnnnnnnnnnnnnnnnnnnnnnnnnnnnnnnnnnnnnnnnnnnnnnnnnnnnnnnnnnnnnnnnnnnnnnnnnnnnnnnnnnnnnnnnnnnnnnnnnnnnnnnnnnnnnnnnnnnnnnnnnnnnnnnnnnnnnnnnnnnnnnnnnnnnnnnnnnnnnnnnnnnnnnnnnnnnnnnnnnnnnnnnnnnnnnnnnnnnnnnnnnnnnnnnnnnnnnnnnnnnnnnnnnnnnnnnnnnnnnnnnnnnnnnnnnnnnnnnnnnnnnnnnnnnnnnnnnnnnnnnnnnnnnnnnnnnnnnnnnnnnnnnnnnnnnnnnnnnnnnnnnnnnnnnnnnnnnnnnnnnnnnnnnnnnnnnnnnnnnnnnnnnnnnnnnnnnnnnnnnnnnnnnnnnnnnnnnnnnnnnnnnnnnnnnnnnnnnnnnnnnnnnnnnnnnnnnnnnnnnnnnnnnnnnnnnnnnnnnnnnnnnnnnnnnnnnnnnnnnnnnnnnnnnnnnnnnnnnnnnnnnnnnnnnnnnnnnnnnnnnnnnnnnnnnnnnnnnnnnnnnnnnnnnnnnnnnnnnnnnnnnnnnnnnnnnnnnnnnnnnnnnnnnnnnnnnnnnnnnnnnnnnnnnnnnnnnnnnnnnnnnnnnnnnnnnnnnnnnnnnnnnnnnnnnnnnnnnnnnnnnnnnnnnnnnnnnnnnnnnnnnnnnnnnnnnnnnnnnnnnnnnnnnnnnnnnnnnnnnnnnnnnnnnnnnnnnnnnnnnnnnnnnnnnnnnnnnnnnnnnnnnnnnnnnnnnnnnnnnnnnnnnnnnnnnnnnnnnnnnnnnnnnnnnnnnnnnnnnnnnnnnnnnnnnnnnnnnnnnnnnnnnnnnnnnnnnnnnnnnnnnnnnnnnnnnnnnnnnnnnnnnnnnnnnnnnnnnnnnnnnnnnnnnnnnnnnnnnnnnnnnnnnnnnnnnnnnnnnnnnnnnnnnnnnnnnnnnnnnnnnnnnnnnnnnnnnnnnnnnnnnnnnnnnnnnnnnnnnnnnnnnnnnnnnnnnnnnnnnnnnnnnnnnnnnnnnnnnnnnnnnnnnnnnnnnnnnnnnnnnnnnnnnnnnnnnnnnnnnnnnnnnnnnnnnnnnnnnnnnnnnnnnnnnnnnnnnnnnnnnnnnnnnnnnnnnnnnnnnnnnnnnnnnnnnnnnnnnnnnnnnnnnnnnnnnnnnnnnnnnnnnnnnnnnnnnnnnnnnnnnnnnnnnnnnnnnnnnnnnnnnnnnnnnnnnnnnnnnnnnnnnnnnnnnnnnnnnnnnnnnnnnnnnnnnnnnnnnnnnnnnnnnnnnnnnnnnnnnnnnnnnnnnnnnnnnnnnnnnnnnnnnnnnnnnnnnnnnnnnnnnnnnnnnnnnnnnnnnnnnnnnnnnnnnnnnnnnnnnnnnnnnnnnnnnnnnnnnnnnnnnnnnnnnnnnnnnnnnnnnnnnnnnnnnnnnnnnnnnnnnnnnnnnnnnnnnnnnnnnnnnnnnnnnnnnnnnnnnnnnnnnnnnnnnnnnnnnnnnnnnnnnnnnnnnnnnnnnnnnnnnnnnnnnnnnnnnnnnnnnnnnnnnnnnnnnnnnnnnnnnnnnnnnnnnnnnnnnnnnnnnnnnnnnnnnnnnnnnnnnnnnnnnnnnnnnnnnnnnnnnnnnnnnnnnnnnnnnnnnnnnnnnnnnnnnnnnnnnnnnnnnnnnnnnnnnnnnnnnnnnnnnnnnnnnnnnnnnnnnnnnnnnnnnnnnnnnnnnnnnnnnnnnnnnnnnnnnnnnnnnnnnnnnnnnnnnnnnnnnnnnnnnnnnnnnnnnnnnnnnnnnnnnnnnnnnnnnnnnnnnnnnnnnnnnnnnnnnnnnnnnnnnnnnnnnnnnnnnnnnnnnnnnnnnnnnnnnnnnnnnnnnnnnnnnnnnnnnnnnnnnnnnnnnnnnnnnnnnnnnnnnnnnnnnnnnnnnnnnnnnnnnnnnnnnnnnnnnnnnnnnnnnnnnnnnnnnnnnnnnnnnnnnnnnnnnnnnnnnnnnnnnnnnnnnnnnnnnnnnnnnnnnnnnnnnnnnnnnnnnnnnnnnnnnnnnnnnnnnnnnnnnnnnnnnnnnnnnnnnnnnnnnnnnnnnnnnnnnnnnnnnnnnnnnnnnnnnnnnnnnnnnnnnnnnnnnnnnnnnnnnnnnnnnnnnnnnnnnnnnnnnnnnnnnnnnnnnnnnnnnnnnnnnnnnnnnnnnnnnnnnnnnnnnnnnnnnnnnnnnnnnnnnnnnnnnnnnnnnnnnnnnnnnnnnnnnnnnnnnnnnnnnnnnnnnnnnnnnnnnnnnnnnnnnnnnnnnnnnnnnnnnnnnnnnnnnnnnnnnnnnnnnnnnnnnnnnnnnnnnnnnnnnnnnnnnnnnnnnnnnnnnnnnnnnnnnnnnnnnnnnnnnnnnnnnnnnnnnnnnnnnnnnnnnnnnnnnnnnnnnnnnnnnnnnnnnnnnnnnnnnnnnnnnnnnnnnnnnnnnnnnnnnnnnnnnnnnnnnnnnnnnnnnnnnnnnnnnnnnnnnnnnnnnnnnnnnnnnnnnnnnnnnnnnnnnnnnnnnnnnnnnnnnnnnnnnnnnnnnnnnnnnnnnnnnnnnnnnnnnnnnnnnnnnnnnnnnnnnnnnnnnnnnnnnnnnnnnnnnnnnnnnnnnnnnnnnnnnnnnnnnnnnnnnnnnnnnnnnnnnnnnnnnnnnnnnnnnnnnnnnnnnnnnnnnnnnnnnnnnnnnnnnnnnnnnnnnnnnnnnnnnnnnnnnnnnnnnnnnnnnnnnnnnnnnnnnnnnnnnnnnnnnnnnnnnnnnnnnnnnnnnnnnnnnnnnnnnnnnnnnnnnnnnnnnnnnnnnnnnnnnnnnnnnnnnnnnnnnnnnnnnnnnnnnnnnnnnnnnnnnnnnnnnnnnnnnnnnnnnnnnnnnnnnnnnnnnnnnnnnnnnnnnnnnnnnnnnnnnnnnnnnnnnnnnnnnnnnnnnnnnnnnnnnnnnnnnnnnnnnnnnnnnnnnnnnnnnnnnnnnnnnnnnnnnnnnnnnnnnnnnnnnnnnnnnnnnnnnnnnnnnnnnnnnnnnnnnnnnnnnnnnnnnnnnnnnnnnnnnnnnnnnnnnnnnnnnnnnnnnnnnnnnnnnnnnnnnnnnnnnnnnnnnnnnnnnnnnnnnnnnnnnnnnnnnnnnnnnnnnnnnnnnnnnnnnnnnnnnnnnnnnnnnnnnnnnnnnnnnnnnnnnnnnnnnnnnnnnnnnnnnnnnnnnnnnnnnnnnnnnnnnnnnnnnnnnnnnnnnnnnnnnnnnnnnnnnnnnnnnnnnnnnnnnnnnnnnnnnnnnnnnnnnnnnnnnnnnnnnnnnnnnnnnnnnnnnnnnnnnnnnnnnnnnnnnnnnnnnnnnnnnnnnnnnnnnnnnnnnnnnnnnnnnnnnnnnnnnnnnnnnnnnnnnnnnnnnnnnnnnnnnnnnnnnnnnnnnnnnnnnnnnnnnnnnnnnnnnnnnnnnnnnnnnnnnnnnnnnnnnnnnnnnnnnnnnnnnnnnnnnnnnnnnnnnnnnnnnnnnnnnnnnnnnnnnnnnnnnnnnnnnnnnnnnnnnnnnnnnnnnnnnnnnnnnnnnnnnnnnnnnnnnnnnnnnnnnnnnnnnnnnnnnnnnnnnnnnnnnnnnnnnnnnnnnnnnnnnnnnnnnnnnnnnnnnnnnnnnnnnnnnnnnnnnnnnnnnnnnnnnnnnnnnnnnnnnnnnnnnnnnnnnnnnnnnnnnnnnnnnnnnnnnnnnnnnnnnnnnnnnnnnnnnnnnnnnnnnnnnnnnnnnnnnnnnnnnnnnnnnnnnnnnnnnnnnnnnnnnnnnnnnnnnnnnnnnnnnnnnnnnnnnnnnnnnnnnnnnnnnnnnnnnnnnnnnnnnnnnnnnnnnnnnnnnnnnnnnnnnnnnnnnnnnnnnnnnnnnnnnnnnnnnnnnnnnnnnnnnnnnnnnnnnnnnnnnnnnnnnnnnnnnnnnnnnnnnnnnnnnnnnnnnnnnnnnnnnnnnnnnnnnnnnnnnnnnnnnnnnnnnnnnnnnnnnnnnnnnnnnnnnnnnnnnnnnnnnnnnnnnnnnnnnnnnnnnnnnnnnnnnnnnnnnnnnnnnnnnnnnnnnnnnnnnnnnnnnnnnnnnnnnnnnnnnnnnnnnnnnnnnnnnnnnnnnnnnnnnnnnnnnnnnnnnnnnnnnnnnnnnnnnnnnnnnnnnnnnnnnnnnnnnnnnnnnnnnnnnnnnnnnnnnnnnnnnnnnnnnnnnnnnnnnnnnnnnnnnnnnnnnnnnnnnnnnnnnnnnnnnnnnnnnnnnnnnnnnnnnnnnnnnnnnnnnnnnnnnnnnnnnnnnnnnnnnnnnnnnnnnnnnnnnnnnnnnnnnnnnnnnnnnnnnnnnnnnnnnnnnnnnnnnnnnnnnnnnnnnnnnnnnnnnnnnnnnnnnnnnnnnnnnnnnnnnnnnnnnnnnnnnnnnnnnnnnnnnnnnnnnnnnnnnnnnnnnnnnnnnnnnnnnnnnnnnnnnnnnnnnnnnnnnnnnnnnnnnnnnnnnnnnnnnnnnnnnnnnnnnnnnnnnnnnnnnnnnnnnnnnnnnnnnnnnnnnnnnnnnnnnnnnnnnnnnnnnnnnnnnnnnnnnnnnnnnnnnnnnnnnnnnnnnnnnnnnnnnnnnnnnnnnnnnnnnnnnnnnnnnnnnnnnnnnnnnnnnnnnnnnnnnnnnnnnnnnnnnnnnnnnnnnnnnnnnnnnnnnnnnnnnnnnnnnnnnnnnnnnnnnnnnnnnnnnnnnnnnnnnnnnnnnnnnnnnnnnnnnnnnnnnnnnnnnnnnnnnnnnnnnnnnnnnnnnnnnnnnnnnnnnnnnnnnnnnnnnnnnnnnnnnnnnnnnnnnnnnnnnnnnnnnnnnnnnnnnnnnnnnnnnnnnnnnnnnnnnnnnnnnnnnnnnnnnnnnnnnnnnnnnnnnnnnnnnnnnnnnnnnnnnnnnnnnnnnnnnnnnnnnnnnnnnnnnnnnnnnnnnnnnnnnnnnnnnnnnnnnnnnnnnnnnnnnnnnnnnnnnnnnnnnnnnnnnnnnnnnnnnnnnnnnnnnnnnnnnnnnnnnnnnnnnnnnnnnnnnnnnnnnnnnnnnnnnnnnnnnnnnnnnnnnnnnnnnnnnnnnnnnnnnnnnnnnnnnnnnnnnnnnnnnnnnnnnnnnnnnnnnnnnnnnnnnnnnnnnnnnnnnnnnnnnnnnnnnnnnnnnnnnnnnnnnnnnnnnnnnnnnnnnnnnnnnnnnnnnnnnnnnnnnnnnnnnnnnnnnnnnnnnnnnnnnnnnnnnnnnnnnnnnnnnnnnnnnnnnnnnnnnnnnnnnnnnnnnnnnnnnnnnnnnnnnnnnnnnnnnnnnnnnnnnnnnnnnnnnnnnnnnnnnnnnnnnnnnnnnnnnnnnnnnnnnnnnnnnnnnnnnnnnnnnnnnnnnnnnnnnnnnnnnnnnnnnnnnnnnnnnnnnnnnnnnnnnnnnnnnnnnnnnnnnnnnnnnnnnnnnnnnnnnnnnnnnnnnnnnnnnnnnnnnnnnnnnnnnnnnnnnnnnnnnnnnnnnnnnnnnnnnnnnnnnnnnnnnnnnnnnnnnnnnnnnnnnnnnnnnnnnnnnnnnnnnnnnnnnnnnnnnnnnnnnnnnnnnnnnnnnnnnnnnnnnnnnnnnnnnnnnnnnnnnnnnnnnnnnnnnnnnnnnnnnnnnnnnnnnnnnnnnnnnnnnnnnnnnnnnnnnnnnnnnnnnnnnnnnnnnnnnnnnnnnnnnnnnnnnnnnnnnnnnnnnnnnnnnnnnnnnnnnnnnnnnnnnnnnnnnnnnnnnnnnnnnnnnnnnnnnnnnnnnnnnnnnnnnnnnnnnnnnnnnnnnnnnnnnnnnnnnnnnnnnnnnnnnnnnnnnnnnnnnnnnnnnnnnnnnnnnnnnnnnnnnnnnnnnnnnnnnnnnnnnnnnnnnnnnnnnnnnnnnnnnnnnnnnnnnnnnnnnnnnnnnnnnnnnnnnnnnnnnnnnnnnnnnnnnnnnnnnnnnnnnnnnnnnnnnnnnnnnnnnnnnnnnnnnnnnnnnnnnnnnnnnnnnnnnnnnnnnnnnnnnnnnnnnnnnnnnnnnnnnnnnnnnnnnnnnnnnnnnnnnnnnnnnnnnnnnnnnnnnnnnnnnnnnnnnnnnnnnnnnnnnnnnnnnnnnnnnnnnnnnnnnnnnnnnnnnnnnnnnnnnnnnnnnnnnnnnnnnnnnnnnnnnnnnnnnnnnnnnnnnnnnnnnnnnnnnnnnnnnnnnnnnnnnnnnnnnnnnnnnnnnnnnnnnnnnnnnnnnnnnnnnnnnnnnnnnnnnnnnnnnnnnnnnnnnnnnnnnnnnnnnnnnnnnnnnnnnnnnnnnnnnnnnnnnnnnnnnnnnnnnnnnnnnnnnnnnnnnnnnnnnnnnnnnnnnnnnnnnnnnnnnnnnnnnnnnnnnnnnnnnnnnnnnnnnnnnnnnnnnnnnnnnnnnnnnnnnnnnnnnnnnnnnnnnnnnnnnnnnnnnnnnnnnnnnnnnnnnnnnnnnnnnnnnnnnnnnnnnnnnnnnnnnnnnnnnnnnnnnnnnnnnnnnnnnnnnnnnnnnnnnnnnnnnnnnnnnnnnnnnnnnnnnnnnnnnnnnnnnnnnnnnnnnnnnnnnnnnnnnnnnnnnnnnnnnnnnnnnnnnnnnnnnnnnnnnnnnnnnnnnnnnnnnnnnnnnnnnnnnnnnnnnnnnnnnnnnnnnnnnnnnnnnnnnnnnnnnnnnnnnnnnnnnnnnnnnnnnnnnnnnnnnnnnnnnnnnnnnnnnnnnnnnnnnnnnnnnnnnnnnnnnnnnnnnnnnnnnnnnnnnnnnnnnnnnnnnnnnnnnnnnnnnnnnnnnnnnnnnnnnnnnnnnnnnnnnnnnnnnnnnnnnnnnnnnnnnnnnnnnnnnnnnnnnnnnnnnnnnnnnnnnnnnnnnnnnnnnnnnnnnnnnnnnnnnnnnnnnnnnnnnnnnnnnnnnnnnnnnnnnnnnnnnnnnnnnnnnnnnnnnnnnnnnnnnnnnnnnnnnnnnnnnnnnnnnnnnnnnnnnnnnnnnnnnnnnnnnnnnnnnnnnnnnnnnnnnnnnnnnnnnnnnnnnnnnnnnnnnnnnnnnnnnnnnnnnnnnnnnnnnnnnnnnnnnnnnnnnnnnnnnnnnnnnnnnnnnnnnnnnnnnnnnnnnnnnnnnnnnnnnnnnnnnnnnnnnnnnnnnnnnnnnnnnnnnnnnnnnnnnnnnnnnnnnnnnnnnnnnnnnnnnnnnnnnnnnnnnnnnnnnnnnnnnnnnnnnnnnnnnnnnnnnnnnnnnnnnnnnnnnnnnnnnnnnnnnnnnnnnnnnnnnnnnnnnnnnnnnnnnnnnnnnnnnnnnnnnnnnnnnnnnnnnnnnnnnnnnnnnnnnnnnnnnnnnnnnnnnnnnnnnnnnnnnnnnnnnnnnnnnnnnnnnnnnnnnnnnnnnnnnnnnnnnnnnnnnnnnnnnnnnnnnnnnnnnnnnnnnnnnnnnnnnnnnnnnnnnnnnnnnnnnnnnnnnnnnnnnnnnnnnnnnnnnnnnnnnnnnnnnnnnnnnnnnnnnnnnnnnnnnnnnnnnnnnnnnnnnnnnnnnnnnnnnnnnnnnnnnnnnnnnnnnnnnnnnnnnnnnnnnnnnnnnnnnnnnnnnnnnnnnnnnnnnnnnnnnnnnnnnnnnnnnnnnnnnnnnnnnnnnnnnnnnnnnnnnnnnnnnnnnnnnnnnnnnnnnnnnnnnnnnnnnnnnnnnnnnnnnnnnnnnnnnnnnnnnnnnnnnnnnnnnnnnnnnnnnnnnnnnnnnnnnnnnnnnnnnnnnnnnnnnnnnnnnnnnnnnnnnnnnnnnnnnnnnnnnnnnnnnnnnnnnnnnnnnnnnnnnnnnnnnnnnnnnnnnnnnnnnnnnnnnnnnnnnnnnnnnnnnnnnnnnnnnnnnnnnnnnnnnnnnnnnnnnnnnnnnnnnnnnnnnnnnnnnnnnnnnnnnnnnnnnnnnnnnnnnnnnnnnnnnnnnnnnnnnnnnnnnnnnnnnnnnnnnnnnnnnnnnnnnnnnnnnnnnnnnnnnnnnnnnnnnnnnnnnnnnnnnnnnnnnnnnnnnnnnnnnnnnnnnnnnnnnnnnnnnnnnnnnnnnnnnnnnnnnnnnnnnnnnnnnnnnnnnnnnnnnnnnnnnnnnnnnnnnnnnnnnnnnnnnnnnnnnnnnnnnnnnnnnnnnnnnnnnnnnnnnnnnnnnnnnnnnnnnnnnnnnnnnnnnnnnnnnnnnnnnnnnnnnnnnnnnnnnnnnnnnnnnnnnnnnnnnnnnnnnnnnnnnnnnnnnnnnnnnnnnnnnnnnnnnnnnnnnnnnnnnnnnnnnnnnnnnnnnnnnnnnnnnnnnnnnnnnnnnnnnnnnnnnnnnnnnnnnnnnnnnnnnnnnnnnnnnnnnnnnnnnnnnnnnnnnnnnnnnnnnnnnnnnnnnnnnnnnnnnnnnnnnnnnnnnnnnnnnnnnnnnnnnnnnnnnnnnnnnnnnnnnnnnnnnnnnnnnnnnnnnnnnnnnnnnnnnnnnnnnnnnnnnnnnnnnnnnnnnnnnnnnnnnnnnnnnnnnnnnnnnnnnnnnnnnnnnnnnnnnnnnnnnnnnnnnnnnnnnnnnnnnnnnnnnnnnnnnnnnnnnnnnnnnnnnnnnnnnnnnnnnnnnnnnnnnnnnnnnnnnnnnnnnnnnnnnnnnnnnnnnnnnnnnnnnnnnnnnnnnnnnnnnnnnnnnnnnnnnnnnnnnnnnnnnnnnnnnnnnnnnnnnnnnnnnnnnnnnnnnnnnnnnnnnnnnnnnnnnnnnnnnnnnnnnnnnnnnnnnnnnnnnnnnnnnnnnnnnnnnnnnnnnnnnnnnnnnnnnnnnnnnnnnnnnnnnnnnnnnnnnnnnnnnnnnnnnnnnnnnnnnnnnnnnnnnnnnnnnnnnnnnnnnnnnnnnnnnnnnnnnnnnnnnnnnnnnnnnnnnnnnnnnnnnnnnnnnnnnnnnnnnnnnnnnnnnnnnnnnnnnnnnnnnnnnnnnnnnnnnnnnnnnnnnnnnnnnnnnnnnnnnnnnnnnnnnnnnnnnnnnnnnnnnnnnnnnnnnnnnnnnnnnnnnnnnnnnnnnnnnnnnnnnnnnnnnnnnnnnnnnnnnnnnnnnnnnnnnnnnnnnnnnnnnnnnnnnnnnnnnnnnnnnnnnnnnnnnnnnnnnnnnnnnnnnnnnnnnnnnnnnnnnnnnnnnnnnnnnnnnnnnnnnnnnnnnnnnnnnnnnnnnnnnnnnnnnnnnnnnnnnnnnnnnnnnnnnnnnnnnnnnnnnnnnnnnnnnnnnnnnnnnnnnnnnnnnnnnnnnnnnnnnnnnnnnnnnnnnnnnnnnnnnnnnnnnnnnnnnnnnnnnnnnnnnnnnnnnnnnnnnnnnnnnnnnnnnnnnnnnnnnnnnnnnnnnnnnnnnnnnnnnnnnnnnnnnnnnnnnnnnnnnnnnnnnnnnnnnnnnnnnnnnnnnnnnnnnnnnnnnnnnnnnnnnnnnnnnnnnnnnnnnnnnnnnnnnnnnnnnnnnnnnnnnnnnnnnnnnnnnnnnnnnnnnnnnnnnnnnnnnnnnnnnnnnnnnnnnnnnnnnnnnnnnnnnnnnnnnnnnnnnnnnnnnnnnnnnnnnnnnnnnnnnnnnnnnnnnnnnnnnnnnnnnnnnnnnnnnnnnnnnnnnnnnnnnnnnnnnnnnnnnnnnnnnnnnnnnnnnnnnnnnnnnnnnnnnnnnnnnnnnnnnnnnnnnnnnnnnnnnnnnnnnnnnnnnnnnnnnnnnnnnnnnnnnnnnnnnnnnnnnnnnnnnnnnnnnnnnnnnnnnnnnnnnnnnnnnnnnnnnnnnnnnnnnnnnnnnnnnnnnnnnnnnnnnnnnnnnnnnnnnnnnnnnnnnnnnnnnnnnnnnnnnnnnnnnnnnnnnnnnnnnnnnnnnnnnnnnnnnnnnnnnnnnnnnnnnnnnnnnnnnnnnnnnnnnnnnnnnnnnnnnnnnnnnnnnnnnnnnnnnnnnnnnnnnnnnnnnnnnnnnnnnnnnnnnnnnnnnnnnnnnnnnnnnnnnnnnnnnnnnnnnnnnnnnnnnnnnnnnnnnnnnnnnnnnnnnnnnnnnnnnnnnnnnnnnnnnnnnnnnnnnnnnnnnnnnnnnnnnnnnnnnnnnnnnnnnnnnnnnnnnnnnnnnnnnnnnnnnnnnnnnnnnnnnnnnnnnnnnnnnnnnnnnnnnnnnnnnnnnnnnnnnnnnnnnnnnnnnnnnnnnnnnnnnnnnnnnnnnnnnnnnnnnnnnnnnnnnnnnnnnnnnnnnnnnnnnnnnnnnnnnnnnnnnnnnnnnnnnnnnnnnnnnnnnnnnnnnnnnnnnnnnnnnnnnnnnnnnnnnnnnnnnnnnnnnnnnnnnnnnnnnnnnnnnnnnnnnnnnnnnnnnnnnnnnnnnnnnnnnnnnnnnnnnnnnnnnnnnnnnnnnnnnnnnnnnnnnnnnnnnnnnnnnnnnnnnnnnnnnnnnnnnnnnnnnnnnnnnnnnnnnnnnnnnnnnnnnnnnnnnnnnnnnnnnnnnnnnnnnnnnnnnnnnnnnnnnnnnnnnnnnnnnnnnnnnnnnnnnnnnnnnnnnnnnnnnnnnnnnnnnnnnnnnnnnnnnnnnnnnnnnnnnnnnnnnnnnnnnnnnnnnnnnnnnnnnnnnnnnnnnnnnnnnnnnnnnnnnnnnnnnnnnnnnnnnnnnnnnnnnnnnnnnnnnnnnnnnnnnnnnnnnnnnnnnnnnnnnnnnnnnnnnnnnnnnnnnnnnnnnnnnnnnnnnnnnnnnnnnnnnnnnnnnnnnnnnnnnnnnnnnnnnnnnnnnnnnnnnnnnnnnnnnnnnnnnnnnnnnnnnnnnnnnnnnnnnnnnnnnnnnnnnnnnnnnnnnnnnnnnnnnnnnnnnnnnnnnnnnnnnnnnnnnnnnnnnnnnnnnnnnnnnnnnnnnnnnnnnnnnnnnnnnnnnnnnnnnnnnnnnnnnnnnnnnnnnnnnnnnnnnnnnnnnnnnnnnnnnnnnnnnnnnnnnnnnnnnnnnnnnnnnnnnnnnnnnnnnnnnnnnnnnnnnnnnnnnnnnnnnnnnnnnnnnnnnnnnnnnnnnnnnnnnnnnnnnnnnnnnnnnnnnnnnnnnnnnnnnnnnnnnnnnnnnnnnnnnnnnnnnnnnnnnnnnnnnnnnnnnnnnnnnnnnnnnnnnnnnnnnnnnnnnnnnnnnnnnnnnnnnnnnnnnnnnnnnnnnnnnnnnnnnnnnnnnnnnnnnnnnnnnnnnnnnnnnnnnnnnnnnnnnnnnnnnnnnnnnnnnnnnnnnnnnnnnnnnnnnnnnnnnnnnnnnnnnnnnnnnnnnnnnnnnnnnnnnnnnnnnnnnnnnnnnnnnnnnnnnnnnnnnnnnnnnnnnnnnnnnnnnnnnnnnnnnnnnnnnnnnnnnnnnnnnnnnnnnnnnnnnnnnnnnnnnnnnnnnnnnnnnnnnnnnnnnnnnnnnnnnnnnnnnnnnnnnnnnnnnnnnnnnnnnnnnnnnnnnnnnnnnnnnnnnnnnnnnnnnnnnnnnnnnnnnnnnnnnnnnnnnnnnnnnnnnnnnnnnnnnnnnnnnnnnnnnnnnnnnnnnnnnnnnnnnnnnnnnnnnnnnnnnnnnnnnnnnnnnnnnnnnnnnnnnnnnnnnnnnnnnnnnnnnnnnnnnnnnnnnnnnnnnnnnnnnnnnnnnnnnnnnnnnnnnnnnnnnnnnnnnnnnnnnnnnnnnnnnnnnnnnnnnnnnnnnnnnnnnnnnnnnnnnnnnnnnnnnnnnnnnnnnnnnnnnnnnnnnnnnnnnnnnnnnnnnnnnnnnnnnnnnnnnnnnnnnnnnnnnnnnnnnnnnnnnnnnnnnnnnnnnnnnnnnnnnnnnnnnnnnnnnnnnnnnnnnnnnnnnnnnnnnnnnnnnnnnnnnnnnnnnnnnnnnnnnnnnnnnnnnnnnnnnnnnnnnnnnnnnnnnnnnnnnnnnnnnnnnnnnnnnnnnnnnnnnnnnnnnnnnnnnnnnnnnnnnnnnnnnnnnnnnnnnnnnnnnnnnnnnnnnnnnnnnnnnnnnnnnnnnnnnnnnnnnnnnnnnnnnnnnnnnnnnnnnnnnnnnnnnnnnnnnnnnnnnnnnnnnnnnnnnnnnnnnnnnnnnnnnnnnnnnnnnnnnnnnnnnnnnnnnnnnnnnnnnnnnnnnnnnnnnnnnnnnnnnnnnnnnnnnnnnnnnnnnnnnnnnnnnnnnnnnnnnnnnnnnnnnnnnnnnnnnnnnnnnnnnnnnnnnnnnnnnnnnnnnnnnnnnnnnnnnnnnnnnnnnnnnnnnnnnnnnnnnnnnnnnnnnnnnnnnnnnnnnnnnnnnnnnnnnnnnnnnnnnnnnnnnnnnnnnnnnnnnnnnnnnnnnnnnnnnnnnnnnnnnnnnnnnnnnnnnnnnnnnnnnnnnnnnnnnnnnnnnnnnnnnnnnnnnnnnnnnnnnnnnnnnnnnnnnnnnnnnnnnnnnnnnnnnnnnnnnnnnnnnnnnnnnnnnnnnnnnnnnnnnnnnnnnnnnnnnnnnnnnnnnnnnnnnnnnnnnnnnnnnnnnnnnnnnnnnnnnnnnnnnnnnnnnnnnnnnnnnnnnnnnnnnnnnnnnnnnnnnnnnnnnnnnnnnnnnnnnnnnnnnnnnnnnnnnnnnnnnnnnnnnnnnnnnnnnnnnnnnnnnnnnnnnnnnnnnnnnnnnnnnnnnnnnnnnnnnnnnnnnnnnnnnnnnnnnnnnnnnnnnnnnnnnnnnnnnnnnnnnnnnnnnnnnnnnnnnnnnnnnnnnnnnnnnnnnnnnnnnnnnnnnnnnnnnnnnnnnnnnnnnnnnnnnnnnnnnnnnnnnnnnnnnnnnnnnnnnnnnnnnnnnnnnnnnnnnnnnnnnnnnnnnnnnnnnnnnnnnnnnnnnnnnnnnnnnnnnnnnnnnnnnnnnnnnnnnnnnnnnnnnnnnnnnnnnnnnnnnnnnnnnnnnnnnnnnnnnnnnnnnnnnnnnnnnnnnnnnnnnnnnnnnnnnnnnnnnnnnnnnnnnnnnnnnnnnnnnnnnnnnnnnnnnnnnnnnnnnnnnnnnnnnnnnnnnnnnnnnnnnnnnnnnnnnnnnnnnnnnnnnnnnnnnnnnnnnnnnnnnnnnnnnnnnnnnnnnnnnnnnnnnnnnnnnnnnnnnnnnnnnnnnnnnnnnnnnnnnnnnnnnnnnnnnnnnnnnnnnnnnnnnnnnnnnnnnnnnnnnnnnnnnnnnnnnnnnnnnnnnnnnnnnnnnnnnnnnnnnnnnnnnnnnnnnnnnnnnnnnnnnnnnnnnnnnnnnnnnnnnnnnnnnnnnnnnnnnnnnnnnnnnnnnnnnnnnnnnnnnnnnnnnnnnnnnnnnnnnnnnnnnnnnnnnnnnnnnnnnnnnnnnnnnnnnnnnnnnnnnnnnnnnnnnnnnnnnnnnnnnnnnnnnnnnnnnnnnnnnnnnnnnnnnnnnnnnnnnnnnnnnnnnnnnnnnnnnnnnnnnnnnnnnnnnnnnnnnnnnnnnnnnnnnnnnnnnnnnnnnnnnnnnnnnnnnnnnnnnnnnnnnnnnnnnnnnnnnnnnnnnnnnnnnnnnnnnnnnnnnnnnnnnnnnnnnnnnnnnnnnnnnnnnnnnnnnnnnnnnnnnnnnnnnnnnnnnnnnnnnnnnnnnnnnnnnnnnnnnnnnnnnnnnnnnnnnnnnnnnnnnnnnnnnnnnnnnnnnnnnnnnnnnnnnnnnnnnnnnnnnnnnnnnnnnnnnnnnnnnnnnnnnnnnnnnnnnnnnnnnnnnnnnnnnnnnnnnnnnnnnnnnnnnnnnnnnnnnnnnnnnnnnnnnnnnnnnnnnnnnnnnnnnnnnnnnnnnnnnnnnnnnnnnnnnnnnnnnnnnnnnnnnnnnnnnnnnnnnnnnnnnnnnnnnnnnnnnnnnnnnnnnnnnnnnnnnnnnnnnnnnnnnnnnnnnnnnnnnnnnnnnnnnnnnnnnnnnnnnnnnnnnnnnnnnnnnnnnnnnnnnnnnnnnnnnnnnnnnnnnnnnnnnnnnnnnnnnnnnnnnnnnnnnnnnnnnnnnnnnnnnnnnnnnnnnnnnnnnnnnnnnnnnnnnnnnnnnnnnnnnnnnnnnnnnnnnnnnnnnnnnnnnnnnnnnnnnnnnnnnnnnnnnnnnnnnnnnnnnnnnnnnnnnnnnnnnnnnnnnnnnnnnnnnnnnnnnnnnnnnnnnnnnnnnnnnnnnnnnnnnnnnnnnnnnnnnnnnnnnnnnnnnnnnnnnnnnnnnnnnnnnnnnnnnnnnnnnnnnnnnnnnnnnnnnnnnnnnnnnnnnnnnnnnnnnnnnnnnnnnnnnnnnnnnnnnnnnnnnnnnnnnnnnnnnnnnnnnnnnnnnnnnnnnnnnnnnnnnnnnnnnnnnnnnnnnnnnnnnnnnnnnnnnnnnnnnnnnnnnnnnnnnnnnnnnnnnnnnnnnnnnnnnnnnnnnnnnnnnnnnnnnnnnnnnnnnnnnnnnnnnnnnnnnnnnnnnnnnnnnnnnnnnnnnnnnnnnnnnnnnnnnnnnnnnnnnnnnnnnnnnnnnnnnnnnnnnnnnnnnnnnnnnnnnnnnnnnnnnnnnnnnnnnnnnnnnnnnnnnnnnnnnnnnnnnnnnnnnnnnnnnnnnnnnnnnnnnnnnnnnnnnnnnnnnnnnnnnnnnnnnnnnnnnnnnnnnnnnnnnnnnnnnnnnnnnnnnnnnnnnnnnnnnnnnnnnnnnnnnnnnnnnnnnnnnnnnnnnnnnnnnnnnnnnnnnnnnnnnnnnnnnnnnnnnnnnnnnnnnnnnnnnnnnnnnnnnnnnnnnnnnnnnnnnnnnnnnnnnnnnnnnnnnnnnnnnnnnnnnnnnnnnnnnnnnnnnnnnnnnnnnnnnnnnnnnnnnnnnnnnnnnnnnnnnnnnnnnnnnnnnnnnnnnnnnnnnnnnnnnnnnnnnnnnnnnnnnnnnnnnnnnnnnnnnnnnnnnnnnnnnnnnnnnnnnnnnnnnnnnnnnnnnnnnnnnnnnnnnnnnnnnnnnnnnnnnnnnnnnnnnnnnnnnnnnnnnnnnnnnnnnnnnnnnnnnnnnnnnnnnnnnnnnnnnnnnnnnnnnnnnnnnnnnnnnnnnnnnnnnnnnnnnnnnnnnnnnnnnnnnnnnnnnnnnnnnnnnnnnnnnnnnnnnnnnnnnnnnnnnnnnnnnnnnnnnnnnnnnnnnnnnnnnnnnnnnnnnnnnnnnnnnnnnnnnnnnnnnnnnnnnnnnnnnnnnnnnnnnnnnnnnnnnnnnnnnnnnnnnnnnnnnnnnnnnnnnnnnnnnnnnnnnnnnnnnnnnnnnnnnnnnnnnnnnnnnnnnnnnnnnnnnnnnnnnnnnnnnnnnnnnnnnnnnnnnnnnnnnnnnnnnnnnnnnnnnnnnnnnnnnnnnnnnnnnnnnnnnnnnnnnnnnnnnnnnnnnnnnnnnnnnnnnnnnnnnnnnnnnnnnnnnnnnnnnnnnnnnnnnnnnnnnnnnnnnnnnnnnnnnnnnnnnnnnnnnnnnnnnnnnnnnnnnnnnnnnnnnnnnnnnnnnnnnnnnnnnnnnnnnnnnnnnnnnnnnnnnnnnnnnnnnnnnnnnnnnnnnnnnnnnnnnnnnnnnnnnnnnnnnnnnnnnnnnnnnnnnnnnnnnnnnnnnnnnnnnnnnnnnnnnnnnnnnnnnnnnnnnnnnnnnnnnnnnnnnnnnnnnnnnnnnnnnnnnnnnnnnnnnnnnnnnnnnnnnnnnnnnnnnnnnnnnnnnnnnnnnnnnnnnnnnnnnnnnnnnnnnnnnnnnnnnnnnnnnnnnnnnnnnnnnnnnnnnnnnnnnnnnnnnnnnnnnnnnnnnnnnnnnnnnnnnnnnnnnnnnnnnnnnnnnnnnnnnnnnnnnnnnnnnnnnnnnnnnnnnnnnnnnnnnnnnnnnnnnnnnnnnnnnnnnnnnnnnnnnnnnnnnnnnnnnnnnnnnnnnnnnnnnnnnnnnnnnnnnnnnnnnnnnnnnnnnnnnnnnnnnnnnnnnnnnnnnnnnnnnnnnnnnnnnnnnnnnnnnnnnnnnnnnnnnnnnnnnnnnnnnnnnnnnnnnnnnnnnnnnnnnnnnnnnnnnnnnnnnnnnnnnnnnnnnnnnnnnnnnnnnnnnnnnnnnnnnnnnnnnnnnnnnnnnnnnnnnnnnnnnnnnnnnnnnnnnnnnnnnnnnnnnnnnnnnnnnnnnnnnnnnnnnnnnnnnnnnnnnnnnnnnnnnnnnnnnnnnnnnnnnnnnnnnnnnnnnnnnnnnnnnnnnnnnnnnnnnnnnnnnnnnnnnnnnnnnnnnnnnnnnnnnnnnnnnnnnnnnnnnnnnnnnnnnnnnnnnnnnnnnnnnnnnnnnnnnnnnnnnnnnnnnnnnnnnnnnnnnnnnnnnnnnnnnnnnnnnnnnnnnnnnnnnnnnnnnnnnnnnnnnnnnnnnnnnnnnnnnnnnnnnnnnnnnnnnnnnnnnnnnnnnnnnnnnnnnnnnnnnnnnnnnnnnnnnnnnnnnnnnnnnnnnnnnnnnnnnnnnnnnnnnnnnnnnnnnnnnnnnnnnnnnnnnnnnnnnnnnnnnnnnnnnnnnnnnnnnnnnnnnnnnnnnnnnnnnnnnnnnnnnnnnnnnnnnnnnnnnnnnnnnnnnnnnnnnnnnnnnnnnnnnnnnnnnnnnnnnnnnnnnnnnnnnnnnnnnnnnnnnnnnnnnnnnnnnnnnnnnnnnnnnnnnnnnnnnnnnnnnnnnnnnnnnnnnnnnnnnnnnnnnnnnnnnnnnnnnnnnnnnnnnnnnnnnnnnnnnnnnnnnnnnnnnnnnnnnnnnnnnnnnnnnnnnnnnnnnnnnnnnnnnnnnnnnnnnnnnnnnnnnnnnnnnnnnnnnnnnnnnnnnnnnnnnnnnnnnnnnnnnnnnnnnnnnnnnnnnnnnnnnnnnnnnnnnnnnnnnnnnnnnnnnnnnnnnnnnnnnnnnnnnnnnnnnnnnnnnnnnnnnnnnnnnnnnnnnnnnnnnnnnnnnnnnnnnnnnnnnnnnnnnnnnnnnnnnnnnnnnnnnnnnnnnnnnnnnnnnnnnnnnnnnnnnnnnnnnnnnnnnnnnnnnnnnnnnnnnnnnnnnnnnnnnnnnnnnnnnnnnnnnnnnnnnnnnnnnnnnnnnnnnnnnnnnnnnnnnnnnnnnnnnnnnnnnnnnnnnnnnnnnnnnnnnnnnnnnnnnnnnnnnnnnnnnnnnnnnnnnnnnnnnnnnnnnnnnnnnnnnnnnnnnnnnnnnnnnnnnnnnnnnnnnnnnnnnnnnnnnnnnnnnnnnnnnnnnnnnnnnnnnnnnnnnnnnnnnnnnnnnnnnnnnnnnnnnnnnnnnnnnnnnnnnnnnnnnnnnnnnnnnnnnnnnnnnnnnnnnnnnnnnnnnnnnnnnnnnnnnnnnnnnnnnnnnnnnnnnnnnnnnnnnnnnnnnnnnnnnnnnnnnnnnnnnnnnnnnnnnnnnnnnnnnnnnnnnnnnnnnnnnnnnnnnnnnnnnnnnnnnnnnnnnnnnnnnnnnnnnnnnnnnnnnnnnnnnnnnnnnnnnnnnnnnnnnnnnnnnnnnnnnnnnnnnnnnnnnnnnnnnnnnnnnnnnnnnnnnnnnnnnnnnnnnnnnnnnnnnnnnnnnnnnnnnnnnnnnnnnnnnnnnnnnnnnnnnnnnnnnnnnnnnnnnnnnnnnnnnnnnnnnnnnnnnnnnnnnnnnnnnnnnnnnnnnnnnnnnnnnnnnnnnnnnnnnnnnnnnnnnnnnnnnnnnnnnnnnnnnnnnnnnnnnnnnnnnnnnnnnnnnnnnnnnnnnnnnnnnnnnnnnnnnnnnnnnnnnnnnnnnnnnnnnnnnnnnnnnnnnnnnnnnnnnnnnnnnnnnnnnnnnnnnnnnnnnnnnnnnnnnnnnnnnnnnnnnnnnnnnnnnnnnnnnnnnnnnnnnnnnnnnnnnnnnnnnnnnnnnnnnnnnnnnnnnnnnnnnnnnnnnnnnnnnnnnnnnnnnnnnnnnnnnnnnnnnnnnnnnnnnnnnnnnnnnnnnnnnnnnnnnnnnnnnnnnnnnnnnnnnnnnnnnnnnnnnnnnnnnnnnnnnnnnnnnnnnnnnnnnnnnnnnnnnnnnnnnnnnnnnnnnnnnnnnnnnnnnnnnnnnnnnnnnnnnnnnnnnnnnnnnnnnnnnnnnnnnnnnnnnnnnnnnnnnnnnnnnnnnnnnnnnnnnnnnnnnnnnnnnnnnnnnnnnnnnnnnnnnnnnnnnnnnnnnnnnnnnnnnnnnnnnnnnnnnnnnnnnnnnnnnnnnnnnnnnnnnnnnnnnnnnnnnnnnnnnnnnnnnnnnnnnnnnnnnnnnnnnnnnnnnnnnnnnnnnnnnnnnnnnnnnnnnnnnnnnnnnnnnnnnnnnnnnnnnnnnnnnnnnnnnnnnnnnnnnnnnnnnnnnnnnnnnnnnnnnnnnnnnnnnnnnnnnnnnnnnnnnnnnnnnnnnnnnnnnnnnnnnnnnnnnnnnnnnnnnnnnnnnnnnnnnnnnnnnnnnnnnnnnnnnnnnnnnnnnnnnnnnnnnnnnnnnnnnnnnnnnnnnnnnnnnnnnnnnnnnnnnnnnnnnnnnnnnnnnnnnnnnnnnnnnnnnnnnnnnnnnnnnnnnnnnnnnnnnnnnnnnnnnnnnnnnnnnnnnnnnnnnnnnnnnnnnnnnnnnnnnnnnnnnnnnnnnnnnnnnnnnnnnnnnnnnnnnnnnnnnnnnnnnnnnnnnnnnnnnnnnnnnnnnnnnnnnnnnnnnnnnnnnnnnnnnnnnnnnnnnnnnnnnnnnnnnnnnnnnnnnnnnnnnnnnnnnnnnnnnnnnnnnnnnnnnnnnnnnnnnnnnnnnnnnnnnnnnnnnnnnnnnnnnnnnnnnnnnnnnnnnnnnnnnnnnnnnnnnnnnnnnnnnnnnnnnnnnnnnnnnnnnnnnnnnnnnnnnnnnnnnnnnnnnnnnnnnnnnnnnnnnnnnnnnnnnnnnnnnnnnnnnnnnnnnnnnnnnnnnnnnnnnnnnnnnnnnnnnnnnnnnnnnnnnnnnnnnnnnnnnnnnnnnnnnnnnnnnnnnnnnnnnnnnnnnnnnnnnnnnnnnnnnnnnnnnnnnnnnnnnnnnnnnnnnnnnnnnnnnnnnnnnnnnnnnnnnnnnnnnnnnnnnnnnnnnnnnnnnnnnnnnnnnnnnnnnnnnnnnnnnnnnnnnnnnnnnnnnnnnnnnnnnnnnnnnnnnnnnnnnnnnnnnnnnnnnnnnnnnnnnnnnnnnnnnnnnnnnnnnnnnnnnnnnnnnnnnnnnnnnnnnnnnnnnnnnnnnnnnnnnnnnnnnnnnnnnnnnnnnnnnnnnnnnnnnnnnnnnnnnnnnnnnnnnnnnnnnnnnnnnnnnnnnnnnnnnnnnnnnnnnnnnnnnnnnnnnnnnnnnnnnnnnnnnnnnnnnnnnnnnnnnnnnnnnnnnnnnnnnnnnnnnnnnnnnnnnnnnnnnnnnnnnnnnnnnnnnnnnnnnnnnnnnnnnnnnnnnnnnnnnnnnnnnnnnnnnnnnnnnnnnnnnnnnnnnnnnnnnnnnnnnnnnnnnnnnnnnnnnnnnnnnnnnnnnnnnnnnnnnnnnnnnnnnnnnnnnnnnnnnnnnnnnnnnnnnnnnnnnnnnnnnnnnnnnnnnnnnnnnnnnnnnnnnnnnnnnnnnnnnnnnnnnnnnnnnnnnnnnnnnnnnnnnnnnnnnnnnnnnnnnnnnnnnnnnnnnnnnnnnnnnnnnnnnnnnnnnnnnnnnnnnnnnnnnnnnnnnnnnnnnnnnnnnnnnnnnnnnnnnnnnnnnnnnnnnnnnnnnnnnnnnnnnnnnnnnnnnnnnnnnnnnnnnnnnnnnnnnnnnnnnnnnnnnnnnnnnnnnnnnnnnnnnnnnnnnnnnnnnnnnnnnnnnnnnnnnnnnnnnnnnnnnnnnnnnnnnnnnnnnnnnnnnnnnnnnnnnnnnnnnnnnnnnnnnnnnnnnnnnnnnnnnnnnnnnnnnnnnnnnnnnnnnnnnnnnnnnnnnnnnnnnnnnnnnnnnnnnnnnnnnnnnnnnnnnnnnnnnnnnnnnnnnnnnnnnnnnnnnnnnnnnnnnnnnnnnnnnnnnnnnnnnnnnnnnnnnnnnnnnnnnnnnnnnnnnnnnnnnnnnnnnnnnnnnnnnnnnnnnnnnnnnnnnnnnnnnnnnnnnnnnnnnnnnnnnnnnnnnnnnnnnnnnnnnnnnnnnnnnnnnnnnnnnnnnnnnnnnnnnnnnnnnnnnnnnnnnnnnnnnnnnnnnnnnnnnnnnnnnnnnnnnnnnnnnnnnnnnnnnnnnnnnnnnnnnnnnnnnnnnnnnnnnnnnnnnnnnnnnnnnnnnnnnnnnnnnnnnnnnnnnnnnnnnnnnnnnnnnnnnnnnnnnnnnnnnnnnnnnnnnnnnnnnnnnnnnnnnnnnnnnnnnnnnnnnnnnnnnnnnnnnnnnnnnnnnnnnnnnnnnnnnnnnnnnnnnnnnnnnnnnnnnnnnnnnnnnnnnnnnnnnnnnnnnnnnnnnnnnnnnnnnnnnnnnnnnnnnnnnnnnnnnnnnnnnnnnnnnnnnnnnnnnnnnnnnnnnnnnnnnnnnnnnnnnnnnnnnnnnnnnnnnnnnnnnnnnnnnnnnnnnnnnnnnnnnnnnnnnnnnnnnnnnnnnnnnnnnnnnnnnnnnnnnnnnnnnnnnnnnnnnnnnnnnnnnnnnnnnnnnnnnnnnnnnnnnnnnnnnnnnnnnnnnnnnnnnnnnnnnnnnnnnnnnnnnnnnnnnnnnnnnnnnnnnnnnnnnnnnnnnnnnnnnnnnnnnnnnnnnnnnnnnnnnnnnnnnnnnnnnnnnnnnnnnnnnnnnnnnnnnnnnnnnnnnnnnnnnnnnnnnnnnnnnnnnnnnnnnnnnnnnnnnnnnnnnnnnnnnnnnnnnnnnnnnnnnnnnnnnnnnnnnnnnnnnnnnnnnnnnnnnnnnnnnnnnnnnnnnnnnnnnnnnnnnnnnnnnnnnnnnnnnnnnnnnnnnnnnnnnnnnnnnnnnnnnnnnnnnnnnnnnnnnnnnnnnnnnnnnnnnnnnnnnnnnnnnnnnnnnnnnnnnnnnnnnnnnnnnnnnnnnnnnnnnnnnnnnnnnnnnnnnnnnnnnnnnnnnnnnnnnnnnnnnnnnnnnnnnnnnnnnnnnnnnnnnnnnnnnnnnnnnnnnnnnnnnnnnnnnnnnnnnnnnnnnnnnnnnnnnnnnnnnnnnnnnnnnnnnnnnnnnnnnnnnnnnnnnnnnnnnnnnnnnnnnnnnnnnnnnnnnnnnnnnnnnnnnnnnnnnnnnnnnnnnnnnnnnnnnnnnnnnnnnnnnnnnnnnnnnnnnnnnnnnnnnnnnnnnnnnnnnnnnnnnnnnnnnnnnnnnnnnnnnnnnnnnnnnnnnnnnnnnnnnnnnnnnnnnnnnnnnnnnnnnnnnnnnnnnnnnnnnnnnnnnnnnnnnnnnnnnnnnnnnnnnnnnnnnnnnnnnnnnnnnnnnnnnnnnnnnnnnnnnnnnnnnnnnnnnnnnnnnnnnnnnnnnnnnnnnnnnnnnnnnnnnnnnnnnnnnnnnnnnnnnnnnnnnnnnnnnnnnnnnnnnnnnnnnnnnnnnnnnnnnnnnnnnnnnnnnnnnnnnnnnnnnnnnnnnnnnnnnnnnnnnnnnnnnnnnnnnnnnnnnnnnnnnnnnnnnnnnnnnnnnnnnnnnnnnnnnnnnnnnnnnnnnnnnnnnnnnnnnnnnnnnnnnnnnnnnnnnnnnnnnnnnnnnnnnnnnnnnnnnnnnnnnnnnnnnnnnnnnnnnnnnnnnnnnnnnnnnnnnnnnnnnnnnnnnnnnnnnnnnnnnnnnnnnnnnnnnnnnnnnnnnnnnnnnnnnnnnnnnnnnnnnnnnnnnnnnnnnnnnnnnnnnnnnnnnnnnnnnnnnnnnnnnnnnnnnnnnnnnnnnnnnnnnnnnnnnnnnnnnnnnnnnnnnnnnnnnnnnnnnnnnnnnnnnnnnnnnnnnnnnnnnnnnnnnnnnnnnnnnnnnnnnnnnnnnnnnnnnnnnnnnnnnnnnnnnnnnnnnnnnnnnnnnnnnnnnnnnnnnnnnnnnnnnnnnnnnnnnnnnnnnnnnnnnnnnnnnnnnnnnnnnnnnnnnnnnnnnnnnnnnnnnnnnnnnnnnnnnnnnnnnnnnnnnnnnnnnnnnnnnnnnnnnnnnnnnnnnnnnnnnnnnnnnnnnnnnnnnnnnnnnnnnnnnnnnnnnnnnnnnnnnnnnnnnnnnnnnnnnnnnnnnnnnnnnnnnnnnnnnnnnnnnnnnnnnnnnnnnnnnnnnnnnnnnnnnnnnnnnnnnnnnnnnnnnnnnnnnnnnnnnnnnnnnnnnnnnnnnnnnnnnnnnnnnnnnnnnnnnnnnnnnnnnnnnnnnnnnnnnnnnnnnnnnnnnnnnnnnnnnnnnnnnnnnnnnnnnnnnnnnnnnnnnnnnnnnnnnnnnnnnnnnnnnnnnnnnnnnnnnnnnnnnnnnnnnnnnnnnnnnnnnnnnnnnnnnnnnnnnnnnnnnnnnnnnnnnnnnnnnnnnnnnnnnnnnnnnnnnnnnnnnnnnnnnnnnnnnnnnnnnnnnnnnnnnnnnnnnnnnnnnnnnnnnnnnnnnnnnnnnnnnnnnnnnnnnnnnnnnnnnnnnnnnnnnnnnnnnnnnnnnnnnnnnnnnnnnnnnnnnnnnnnnnnnnnnnnnnnnnnnnnnnnnnnnnnnnnnnnnnnnnnnnnnnnnnnnnnnnnnnnnnnnnnnnnnnnnnnnnnnnnnnnnnnnnnnnnnnnnnnnnnnnnnnnnnnnnnnnnnnnnnnnnnnnnnnnnnnnnnnnnnnnnnnnnnnnnnnnnnnnnnnnnnnnnnnnnnnnnnnnnnnnnnnnnnnnnnnnnnnnnnnnnnnnnnnnnnnnnnnnnnnnnnnnnnnnnnnnnnnnnnnnnnnnnnnnnnnnnnnnnnnnnnnnnnnnnnnnnnnnnnnnnnnnnnnnnnnnnnnnnnnnnnnnnnnnnnnnnnnnnnnnnnnnnnnnnnnnnnnnnnnnnnnnnnnnnnnnnnnnnnnnnnnnnnnnnnnnnnnnnnnnnnnnnnnnnnnnnnnnnnnnnnnnnnnnnnnnnnnnnnnnnnnnnnnnnnnnnnnnnnnnnnnnnnnnnnnnnnnnnnnnnnnnnnnnnnnnnnnnnnnnnnnnnnnnnnnnnnnnnnnnnnnnnnnnnnnnnnnnnnnnnnnnnnnnnnnnnnnnnnnnnnnnnnnnnnnnnnnnnnnnnnnnnnnnnnnnnnnnnnnnnnnnnnnnnnnnnnnnnnnnnnnnnnnnnnnnnnnnnnnnnnnnnnnnnnnnnnnnnnnnnnnnnnnnnnnnnnnnnnnnnnnnnnnnnnnnnnnnnnnnnnnnnnnnnnnnnnnnnnnnnnnnnnnnnnnnnnnnnnnnnnnnnnnnnnnnnnnnnnnnnnnnnnnnnnnnnnnnnnnnnnnnnnnnnnnnnnnnnnnnnnnnnnnnnnnnnnnnnnnnnnnnnnnnnnnnnnnnnnnnnnnnnnnnnnnnnnnnnnnnnnnnnnnnnnnnnnnnnnnnnnnnnnnnnnnnnnnnnnnnnnnnnnnnnnnnnnnnnnnnnnnnnnnnnnnnnnnnnnnnnnnnnnnnnnnnnnnnnnnnnnnnnnnnnnnnnnnnnnnnnnnnnnnnnnnnnnnnnnnnnnnnnnnnnnnnnnnnnnnnnnnnnnnnnnnnnnnnnnnnnnnnnnnnnnnnnnnnnnnnnnnnnnnnnnnnnnnnnnnnnnnnnnnnnnnnnnnnnnnnnnnnnnnnnnnnnnnnnnnnnnnnnnnnnnnnnnnnnnnnnnnnnnnnnnnnnnnnnnnnnnnnnnnnnnnnnnnnnnnnnnnnnnnnnnnnnnnnnnnnnnnnnnnnnnnnnnnnnnnnnnnnnnnnnnnnnnnnnnnnnnnnnnnnnnnnnnnnnnnnnnnnnnnnnnnnnnnnnnnnnnnnnnnnnnnnnnnnnnnnnnnnnnnnnnnnnnnnnnnnnnnnnnnnnnnnnnnnnnnnnnnnnnnnnnnnnnnnnnnnnnnnnnnnnnnnnnnnnnnnnnnnnnnnnnnnnnnnnnnnnnnnnnnnnnnnnnnnnnnnnnnnnnnnnnnnnnnnnnnnnnnnnnnnnnnnnnnnnnnnnnnnnnnnnnnnnnnnnnnnnnnnnnnnnnnnnnnnnnnnnnnnnnnnnnnnnnnnnnnnnnnnnnnnnnnnnnnnnnnnnnnnnnnnnnnnnnnnnnnnnnnnnnnnnnnnnnnnnnnnnnnnnnnnnnnnnnnnnnnnnnnnnnnnnnnnnnnnnnnnnnnnnnnnnnnnnnnnnnnnnnnnnnnnnnnnnnnnnnnnnnnnnnnnnnnnnnnnnnnnnnnnnnnnnnnnnnnnnnnnnnnnnnnnnnnnnnnnnnnnnnnnnnnnnnnnnnnnnnnnnnnnnnnnnnnnnnnnnnnnnnnnnnnnnnnnnnnnnnnnnnnnnnnnnnnnnnnnnnnnnnnnnnnnnnnnnnnnnnnnnnnnnnnnnnnnnnnnnnnnnnnnnnnnnnnnnnnnnnnnnnnnnnnnnnnnnnnnnnnnnnnnnnnnnnnnnnnnnnnnnnnnnnnnnnnnnnnnnnnnnnnnnnnnnnnnnnnnnnnnnnnnnnnnnnnnnnnnnnnnnnnnnnnnnnnnnnnnnnnnnnnnnnnnnnnnnnnnnnnnnnnnnnnnnnnnnnnnnnnnnnnnnnnnnnnnnnnnnnnnnnnnnnnnnnnnnnnnnnnnnnnnnnnnnnnnnnnnnnnnnnnnnnnnnnnnnnnnnnnnnnnnnnnnnnnnnnnnnnnnnnnnnnnnnnnnnnnnnnnnnnnnnnnnnnnnnnnnnnnnnnnnnnnnnnnnnnnnnnnnnnnnnnnnnnnnnnnnnnnnnnnnnnnnnnnnnnnnnnnnnnnnnnnnnnnnnnnnnnnnnnnnnnnnnnnnnnnnnnnnnnnnnnnnnnnnnnnnnnnnnnnnnnnnnnnnnnnnnnnnnnnnnnnnnnnnnnnnnnnnnnnnnnnnnnnnnnnnnnnnnnnnnnnnnnnnnnnnnnnnnnnnnnnnnnnnnnnnnnnnnnnnnnnnnnnnnnnnnnnnnnnnnnnnnnnnnnnnnnnnnnnnnnnnnnnnnnnnnnnnnnnnnnnnnnnnnnnnnnnnnnnnnnnnnnnnnnnnnnnnnnnnnnnnnnnnnnnnnnnnnnnnnnnnnnnnnnnnnnnnnnnnnnnnnnnnnnnnnnnnnnnnnnnnnnnnnnnnnnnnnnnnnnnnnnnnnnnnnnnnnnnnnnnnnnnnnnnnnnnnnnnnnnnnnnnnnnnnnnnnnnnnnnnnnnnnnnnnnnnnnnnnnnnnnnnnnnnnnnnnnnnnnnnnnnnnnnnnnnnnnnnnnnnnnnnnnnnnnnnnnnnnnnnnnnnnnnnnnnnnnnnnnnnnnnnnnnnnnnnnnnnnnnnnnnnnnnnnnnnnnnnnnnnnnnnnnnnnnnnnnnnnnnnnnnnnnnnnnnnnnnnnnnnnnnnnnnnnnnnnnnnnnnnnnnnnnnnnnnnnnnnnnnnnnnnnnnnnnnnnnnnnnnnnnnnnnnnnnnnnnnnnnnnnnnnnnnnnnnnnnnnnnnnnnnnnnnnnnnnnnnnnnnnnnnnnnnnnnnnnnnnnnnnnnnnnnnnnnnnnnnnnnnnnnnnnnnnnnnnnnnnnnnnnnnnnnnnnnnnnnnnnnnnnnnnnnnnnnnnnnnnnnnnnnnnnnnnnnnnnnnnnnnnnnnnnnnnnnnnnnnnnnnnnnnnnnnnnnnnnnnnnnnnnnnnnnnnnnnnnnnnnnnnnnnnnnnnnnnnnnnnnnnnnnnnnnnnnnnnnnnnnnnnnnnnnnnnnnnnnnnnnnnnnnnnnnnnnnnnnnnnnnnnnnnnnnnnnnnnnnnnnnnnnnnnnnnnnnnnnnnnnnnnnnnnnnnnnnnnnnnnnnnnnnnnnnnnnnnnnnnnnnnnnnnnnnnnnnnnnnnnnnnnnnnnnnnnnnnnnnnnnnnnnnnnnnnnnnnnnnnnnnnnnnnnnnnnnnnnnnnnnnnnnnnnnnnnnnnnnnnnnnnnnnnnnnnnnnnnnnnnnnnnnnnnnnnnnnnnnnnnnnnnnnnnnnnnnnnnnnnnnnnnnnnnnnnnnnnnnnnnnnnnnnnnnnnnnnnnnnnnnnnnnnnnnnnnnnnnnnnnnnnnnnnnnnnnnnnnnnnnnnnnnnnnnnnnnnnnnnnnnnnnnnnnnnnnnnnnnnnnnnnnnnnnnnnnnnnnnnnnnnnnnnnnnnnnnnnnnnnnnnnnnnnnnnnnnnnnnnnnnnnnnnnnnnnnnnnnnnnnnnnnnnnnnnnnnnnnnnnnnnnnnnnnnnnnnnnnnnnnnnnnnnnnnnnnnnnnnnnnnnnnnnnnnnnnnnnnnnnnnnnnnnnnnnnnnnnnnnnnnnnnnnnnnnnnnnnnnnnnnnnnnnnnnnnnnnnnnnnnnnnnnnnnnnnnnnnnnnnnnnnnnnnnnnnnnnnnnnnnnnnnnnnnnnnnnnnnnnnnnnnnnnnnnnnnnnnnnnnnnnnnnnnnnnnnnnnnnnnnnnnnnnnnnnnnnnnnnnnnnnnnnnnnnnnnnnnnnnnnnnnnnnnnnnnnnnnnnnnnnnnnnnnnnnnnnnnnnnnnnnnnnnnnnnnnnnnnnnnnnnnnnnnnnnnnnnnnnnnnnnnnnnnnnnnnnnnnnnnnnnnnnnnnnnnnnnnnnnnnnnnnnnnnnnnnnnnnnnnnnnnnnnnnnnnnnnnnnnnnnnnnnnnnnnnnnnnnnnnnnnnnnnnnnnnnnnnnnnnnnnnnnnnnnnnnnnnnnnnnnnnnnnnnnnnnnnnnnnnnnnnnnnnnnnnnnnnnnnnnnnnnnnnnnnnnnnnnnnnnnnnnnnnnnnnnnnnnnnnnnnnnnnnnnnnnnnnnnnnnnnnnnnnnnnnnnnnnnnnnnnnnnnnnnnnnnnnnnnnnnnnnnnnnnnnnnnnnnnnnnnnnnnnnnnnnnnnnnnnnnnnnnnnnnnnnnnnnnnnnnnnnnnnnnnnnnnnnnnnnnnnnnnnnnnnnnnnnnnnnnnnnnnnnnnnnnnnnnnnnnnnnnnnnnnnnnnnnnnnnnnnnnnnnnnnnnnnnnnnnnnnnnnnnnnnnnnnnnnnnnnnnnnnnnnnnnnnnnnnnnnnnnnnnnnnnnnnnnnnnnnnnnnnnnnnnnnnnnnnnnnnnnnnnnnnnnnnnnnnnnnnnnnnnnnnnnnnnnnnnnnnnnnnnnnnnnnnnnnnnnnnnnnnnnnnnnnnnnnnnnnnnnnnnnnnnnnnnnnnnnnnnnnnnnnnnnnnnnnnnnnnnnnnnnnnnnnnnnnnnnnnnnnnnnnnnnnnnnnnnnnnnnnnnnnnnnnnnnnnnnnnnnnnnnnnnnnnnnnnnnnnnnnnnnnnnnnnnnnnnnnnnnnnnnnnnnnnnnnnnnnnnnnnnnnnnnnnnnnnnnnnnnnnnnnnnnnnnnnnnnnnnnnnnnnnnnnnnnnnnnnnnnnnnnnnnnnnnnnnnnnnnnnnnnnnnnnnnnnnnnnnnnnnnnnnnnnnnnnnnnnnnnnnnnnnnnnnnnnnnnnnnnnnnnnnnnnnnnnnnnnnnnnnnnnnnnnnnnnnnnnnnnnnnnnnnnnnnnnnnnnnnnnnnnnnnnnnnnnnnnnnnnnnnnnnnnnnnnnnnnnnnnnnnnnnnnnnnnnnnnnnnnnnnnnnnnnnnnnnnnnnnnnnnnnnnnnnnnnnnnnnnnnnnnnnnnnnnnnnnnnnnnnnnnnnnnnnnnnnnnnnnnnnnnnnnnnnnnnnnnnnnnnnnnnnnnnnnnnnnnnnnnnnnnnnnnnnnnnnnnnnnnnnnnnnnnnnnnnnnnnnnnnnnnnnnnnnnnnnnnnnnnnnnnnnnnnnnnnnnnnnnnnnnnnnnnnnnnnnnnnnnnnnnnnnnnnnnnnnnnnnnnnnnnnnnnnnnnnnnnnnnnnnnnnnnnnnnnnnnnnnnnnnnnnnnnnnnnnnnnnnnnnnnnnnnnnnnnnnnnnnnnnnnnnnnnnnnnnnnnnnnnnnnnnnnnnnnnnnnnnnnnnnnnnnnnnnnnnnnnnnnnnnnnnnnnnnnnnnnnnnnnnnnnnnnnnnnnnnnnnnnnnnnnnnnnnnnnnnnnnnnnnnnnnnnnnnnnnnnnnnnnnnnnnnnnnnnnnnnnnnnnnnnnnnnnnnnnnnnnnnnnnnnnnnnnnnnnnnnnnnnnnnnnnnnnnnnnnnnnnnnnnnnnnnnnnnnnnnnnnnnnnnnnnnnnnnnnnnnnnnnnnnnnnnnnnnnnnnnnnnnnnnnnnnnnnnnnnnnnnnnnnnnnnnnnnnnnnnnnnnnnnnnnnnnnnnnnnnnnnnnnnnnnnnnnnnnnnnnnnnnnnnnnnnnnnnnnnnnnnnnnnnnnnnnnnnnnnnnnnnnnnnnnnnnnnnnnnnnnnnnnnnnnnnnnnnnnnnnnnnnnnnnnnnnnnnnnnnnnnnnnnnnnnnnnnnnnnnnnnnnnnnnnnnnnnnnnnnnnnnnnnnnnnnnnnnnnnnnnnnnnnnnnnnnnnnnnnnnnnnnnnnnnnnnnnnnnnnnnnnnnnnnnnnnnnnnnnnnnnnnnnnnnnnnnnnnnnnnnnnnnnnnnnnnnnnnnnnnnnnnnnnnnnnnnnnnnnnnnnnnnnnnnnnnnnnnnnnnnnnnnnnnnnnnnnnnnnnnnnnnnnnnnnnnnnnnnnnnnnnnnnnnnnnnnnnnnnnnnnnnnnnnnnnnnnnnnnnnnnnnnnnnnnnnnnnnnnnnnnnnnnnnnnnnnnnnnnnnnnnnnnnnnnnnnnnnnnnnnnnnnnnnnnnnnnnnnnnnnnnnnnnnnnnnnnnnnnnnnnnnnnnnnnnnnnnnnnnnnnnnnnnnnnnnnnnnnnnnnnnnnnnnnnnnnnnnnnnnnnnnnnnnnnnnnnnnnnnnnnnnnnnnnnnnnnnnnnnnnnnnnnnnnnnnnnnnnnnnnnnnnnnnnnnnnnnnnnnnnnnnnnnnnnnnnnnnnnnnnnnnnnnnnnnnnnnnnnnnnnnnnnnnnnnnnnnnnnnnnnnnnnnnnnnnnnnnnnnnnnnnnnnnnnnnnnnnnnnnnnnnnnnnnnnnnnnnnnnnnnnnnnnnnnnnnnnnnnnnnnnnnnnnnnnnnnnnnnnnnnnnnnnnnnnnnnnnnnnnnnnnnnnnnnnnnnnnnnnnnnnnnnnnnnnnnnnnnnnnnnnnnnnnnnnnnnnnnnnnnnnnnnnnnnnnnnnnnnnnnnnnnnnnnnnnnnnnnnnnnnnnnnnnnnnnnnnnnnnnnnnnnnnnnnnnnnnnnnnnnnnnnnnnnnnnnnnnnnnnnnnnnnnnnnnnnnnnnnnnnnnnnnnnnnnnnnnnnnnnnnnnnnnnnnnnnnnnnnnnnnnnnnnnnnnnnnnnnnnnnnnnnnnnnnnnnnnnnnnnnnnnnnnnnnnnnnnnnnnnnnnnnnnnnnnnnnnnnnnnnnnnnnnnnnnnnnnnnnnnnnnnnnnnnnnnnnnnnnnnnnnnnnnnnnnnnnnnnnnnnnnnnnnnnnnnnnnnnnnnnnnnnnnnnnnnnnnnnnnnnnnnnnnnnnnnnnnnnnnnnnnnnnnnnnnnnnnnnnnnnnnnnnnnnnnnnnnnnnnnnnnnnnnnnnnnnnnnnnnnnnnnnnnnnnnnnnnnnnnnnnnnnnnnnnnnnnnnnnnnnnnnnnnnnnnnnnnnnnnnnnnnnnnnnnnnnnnnnnnnnnnnnnnnnnnnnnnnnnnnnnnnnnnnnnnnnnnnnnnnnnnnnnnnnnnnnnnnnnnnnnnnnnnnnnnnnnnnnnnnnnnnnnnnnnnnnnnnnnnnnnnnnnnnnnnnnnnnnnnnnnnnnnnnnnnnnnnnnnnnnnnnnnnnnnnnnnnnnnnnnnnnnnnnnnnnnnnnnnnnnnnnnnnnnnnnnnnnnnnnnnnnnnnnnnnnnnnnnnnnnnnnnnnnnnnnnnnnnnnnnnnnnnnnnnnnnnnnnnnnnnnnnnnnnnnnnnnnnnnnnnnnnnnnnnnnnnnnnnnnnnnnnnnnnnnnnnnnnnnnnnnnnnnnnnnnnnnnnnnnnnnnnnnnnnnnnnnnnnnnnnnnnnnnnnnnnnnnnnnnnnnnnnnnnnnnnnnnnnnnnnnnnnnnnnnnnnnnnnnnnnnnnnnnnnnnnnnnnnnnnnnnnnnnnnnnnnnnnnnnnnnnnnnnnnnnnnnnnnnnnnnnnnnnnnnnnnnnnnnnnnnnnnnnnnnnnnnnnnnnnnnnnnnnnnnnnnnnnnnnnnnnnnnnnnnnnnnnnnnnnnnnnnnnnnnnnnnnnnnnnnnnnnnnnnnnnnnnnnnnnnnnnnnnnnnnnnnnnnnnnnnnnnnnnnnnnnnnnnnnnnnnnnnnnnnnnnnnnnnnnnnnnnnnnnnnnnnnnnnnnnnnnnnnnnnnnnnnnnnnnnnnnnnnnnnnnnnnnnnnnnnnnnnnnnnnnnnnnnnnnnnnnnnnnnnnnnnnnnnnnnnnnnnnnnnnnnnnnnnnnnnnnnnnnnnnnnnnnnnnnnnnnnnnnnnnnnnnnnnnnnnnnnnnnnnnnnnnnnnnnnnnnnnnnnnnnnnnnnnnnnnnnnnnnnnnnnnnnnnnnnnnnnnnnnnnnnnnnnnnnnnnnnnnnnnnnnnnnnnnnnnnnnnnnnnnnnnnnnnnnnnnnnnnnnnnnnnnnnnnnnnnnnnnnnnnnnnnnnnnnnnnnnnnnnnnnnnnnnnnnnnnnnnnnnnnnnnnnnnnnnnnnnnnnnnnnnnnnnnnnnnnnnnnnnnnnnnnnnnnnnnnnnnnnnnnnnnnnnnnnnnnnnnnnnnnnnnnnnnnnnnnnnnnnnnnnnnnnnnnnnnnnnnnnnnnnnnnnnnnnnnnnnnnnnnnnnnnnnnnnnnnnnnnnnnnnnnnnnnnnnnnnnnnnnnnnnnnnnnnnnnnnnnnnnnnnnnnnnnnnnnnnnnnnnnnnnnnnnnnnnnnnnnnnnnnnnnnnnnnnnnnnnnnnnnnnnnnnnnnnnnnnnnnnnnnnnnnnnnnnnnnnnnnnnnnnnnnnnnnnnnnnnnnnnnnnnnnnnnnnnnnnnnnnnnnnnnnnnnnnnnnnnnnnnnnnnnnnnnnnnnnnnnnnnnnnnnnnnnnnnnnnnnnnnnnnnnnnnnnnnnnnnnnnnnnnnnnnnnnnnnnnnnnnnnnnnnnnnnnnnnnnnnnnnnnnnnnnnnnnnnnnnnnnnnnnnnnnnnnnnnnnnnnnnnnnnnnnnnnnnnnnnnnnnnnnnnnnnnnnnnnnnnnnnnnnnnnnnnnnnnnnnnnnnnnnnnnnnnnnnnnnnnnnnnnnnnnnnnnnnnnnnnnnnnnnnnnnnnnnnnnnnnnnnnnnnnnnnnnnnnnnnnnnnnnnnnnnnnnnnnnnnnnnnnnnnnnnnnnnnnnnnnnnnnnnnnnnnnnnnnnnnnnnnnnnnnnnnnnnnnnnnnnnnnnnnnnnnnnnnnnnnnnnnnnnnnnnnnnnnnnnnnnnnnnnnnnnnnnnnnnnnnnnnnnnnnnnnnnnnnnnnnnnnnnnnnnnnnnnnnnnnnnnnnnnnnnnnnnnnnnnnnnnnnnnnnnnnnnnnnnnnnnnnnnnnnnnnnnnnnnnnnnnnnnnnnnnnnnnnnnnnnnnnnnnnnnnnnnnnnnnnnnnnnnnnnnnnnnnnnnnnnnnnnnnnnnnnnnnnnnnnnnnnnnnnnnnnnnnnnnnnnnnnnnnnnnnnnnnnnnnnnnnnnnnnnnnnnnnnnnnnnnnnnnnnnnnnnnnnnnnnnnnnnnnnnnnnnnnnnnnnnnnnnnnnnnnnnnnnnnnnnnnnnnnnnnnnnnnnnnnnnnnnnnnnnnnnnnnnnnnnnnnnnnnnnnnnnnnnnnnnnnnnnnnnnnnnnnnnnnnnnnnnnnnnnnnnnnnnnnnnnnnnnnnnnnnnnnnnnnnnnnnnnnnnnnnnnnnnnnnnnnnnnnnnnnnnnnnnnnnnnnnnnnnnnnnnnnnnnnnnnnnnnnnnnnnnnnnnnnnnnnnnnnnnnnnnnnnnnnnnnnnnnnnnnnnnnnnnnnnnnnnnnnnnnnnnnnnnnnnnnnnnnnnnnnnnnnnnnnnnnnnnnnnnnnnnnnnnnnnnnnnnnnnnnnnnnnnnnnnnnnnnnnnnnnnnnnnnnnnnnnnnnnnnnnnnnnnnnnnnnnnnnnnnnnnnnnnnnnnnnnnnnnnnnnnnnnnnnnnnnnnnnnnnnnnnnnnnnnnnnnnnnnnnnnnnnnnnnnnnnnnnnnnnnnnnnnnnnnnnnnnnnnnnnnnnnnnnnnnnnnnnnnnnnnnnnnnnnnnnnnnnnnnnnnnnnnnnnnnnnnnnnnnnnnnnnnnnnnnnnnnnnnnnnnnnnnnnnnnnnnnnnnnnnnnnnnnnnnnnnnnnnnnnnnnnnnnnnnnnnnnnnnnnnnnnnnnnnnnnnnnnnnnnnnnnnnnnnnnnnnnnnnnnnnnnnnnnnnnnnnnnnnnnnnnnnnnnnnnnnnnnnnnnnnnnnnnnnnnnnnnnnnnnnnnnnnnnnnnnnnnnnnnnnnnnnnnnnnnnnnnnnnnnnnnnnnnnnnnnnnnnnnnnnnnnnnnnnnnnnnnnnnnnnnnnnnnnnnnnnnnnnnnnnnnnnnnnnnnnnnnnnnnnnnnnnnnnnnnnnnnnnnnnnnnnnnnnnnnnnnnnnnnnnnnnnnnnnnnnnnnnnnnnnnnnnnnnnnnnnnnnnnnnnnnnnnnnnnnnnnnnnnnnnnnnnnnnnnnnnnnnnnnnnnnnnnnnnnnnnnnnnnnnnnnnnnnnnnnnnnnnnnnnnnnnnnnnnnnnnnnnnnnnnnnnnnnnnnnnnnnnnnnnnnnnnnnnnnnnnnnnnnnnnnnnnnnnnnnnnnnnnnnnnnnnnnnnnnnnnnnnnnnnnnnnnnnnnnnnnnnnnnnnnnnnnnnnnnnnnnnnnnnnnnnnnnnnnnnnnnnnnnnnnnnnnnnnnnnnnnnnnnnnnnnnnnnnnnnnnnnnnnnnnnnnnnnnnnnnnnnnnnnnnnnnnnnnnnnnnnnnnnnnnnnnnnnnnnnnnnnnnnnnnnnnnnnnnnnnnnnnnnnnnnnnnnnnnnnnnnnnnnnnnnnnnnnnnnnnnnnnnnnnnnnnnnnnnnnnnnnnnnnnnnnnnnnnnnnnnnnnnnnnnnnnnnnnnnnnnnnnnnnnnnnnnnnnnnnnnnnnnnnnnnnnnnnnnnnnnnnnnnnnnnnnnnnnnnnnnnnnnnnnnnnnnnnnnnnnnnnnnnnnnnnnnnnnnnnnnnnnnnnnnnnnnnnnnnnnnnnnnnnnnnnnnnnnnnnnnnnnnnnnnnnnnnnnnnnnnnnnnnnnnnnnnnnnnnnnnnnnnnnnnnnnnnnnnnnnnnnnnnnnnnnnnnnnnnnnnnnnnnnnnnnnnnnnnnnnnnnnnnnnnnnnnnnnnnnnnnnnnnnnnnnnnnnnnnnnnnnnnnnnnnnnnnnnnnnnnnnnnnnnnnnnnnnnnnnnnnnnnnnnnnnnnnnnnnnnnnnnnnnnnnnnnnnnnnnnnnnnnnnnnnnnnnnnnnnnnnnnnnnnnnnnnnnnnnnnnnnnnnnnnnnnnnnnnnnnnnnnnnnnnnnnnnnnnnnnnnnnnnnnnnnnnnnnnnnnnnnnnnnnnnnnnnnnnnnnnnnnnnnnnnnnnnnnnnnnnnnnnnnnnnnnnnnnnnnnnnnnnnnnnnnnnnnnnnnnnnnnnnnnnnnnnnnnnnnnnnnnnnnnnnnnnnnnnnnnnnnnnnnnnnnnnnnnnnnnnnnnnnnnnnnnnnnnnnnnnnnnnnnnnnnnnnnnnnnnnnnnnnnnnnnnnnnnnnnnnnnnnnnnnnnnnnnnnnnnnnnnnnnnnnnnnnnnnnnnnnnnnnnnnnnnnnnnnnnnnnnnnnnnnnnnnnnnnnnnnnnnnnnnnnnnnnnnnnnnnnnnnnnnnnnnnnnnnnnnnnnnnnnnnnnnnnnnnnnnnnnnnnnnnnnnnnnnnnnnnnnnnnnnnnnnnnnnnnnnnnnnnnnnnnnnnnnnnnnnnnnnnnnnnnnnnnnnnnnnnnnnnnnnnnnnnnnnnnnnnnnnnnnnnnnnnnnnnnnnnnnnnnnnnnnnnnnnnnnnnnnnnnnnnnnnnnnnnnnnnnnnnnnnnnnnnnnnnnnnnnnnnnnnnnnnnnnnnnnnnnnnnnnnnnnnnnnnnnnnnnnnnnnnnnnnnnnnnnnnnnnnnnnnnnnnnnnnnnnnnnnnnnnnnnnnnnnnnnnnnnnnnnnnnnnnnnnnnnnnnnnnnnnnnnnnnnnnnnnnnnnnnnnnnnnnnnnnnnnnnnnnnnnnnnnnnnnnnnnnnnnnnnnnnnnnnnnnnnnnnnnnnnnnnnnnnnnnnnnnnnnnnnnnnnnnnnnnnnnnnnnnnnnnnnnnnnnnnnnnnnnnnnnnnnnnnnnnnnnnnnnnnnnnnnnnnnnnnnnnnnnnnnnnnnnnnnnnnnnnnnnnnnnnnnnnnnnnnnnnnnnnnnnnnnnnnnnnnnnnnnnnnnnnnnnnnnnnnnnnnnnnnnnnnnnnnnnnnnnnnnnnnnnnnnnnnnnnnnnnnnnnnnnnnnnnnnnnnnnnnnnnnnnnnnnnnnnnnnnnnnnnnnnnnnnnnnnnnnnnnnnnnnnnnnnnnnnnnnnnnnnnnnnnnnnnnnnnnnnnnnnnnnnnnnnnnnnnnnnnnnnnnnnnnnnnnnnnnnnnnnnnnnnnnnnnnnnnnnnnnnnnnnnnnnnnnnnnnnnnnnnnnnnnnnnnnnnnnnnnnnnnnnnnnnnnnnnnnnnnnnnnnnnnnnnnnnnnnnnnnnnnnnnnnnnnnnnnnnnnnnnnnnnnnnnnnnnnnnnnnnnnnnnnnnnnnnnnnnnnnnnnnnnnnnnnnnnnnnnnnnnnnnnnnnnnnnnnnnnnnnnnnnnnnnnnnnnnnnnnnnnnnnnnnnnnnnnnnnnnnnnnnnnnnnnnnnnnnnnnnnnnnnnnnnnnnnnnnnnnnnnnnnnnnnnnnnnnnnnnnnnnnnnnnnnnnnnnnnnnnnnnnnnnnnnnnnnnnnnnnnnnnnnnnnnnnnnnnnnnnnnnnnnnnnnnnnnnnnnnnnnnnnnnnnnnnnnnnnnnnnnnnnnnnnnnnnnnnnnnnnnnnnnnnnnnnnnnnnnnnnnnnnnnnnnnnnnnnnnnnnnnnnnnnnnnnnnnnnnnnnnnnnnnnnnnnnnnnnnnnnnnnnnnnnnnnnnnnnnnnnnnnnnnnnnnnnnnnnnnnnnnnnnnnnnnnnnnnnnnnnnnnnnnnnnnnnnnnnnnnnnnnnnnnnnnnnnnnnnnnnnnnnnnnnnnnnnnnnnnnnnnnnnnnnnnnnnnnnnnnnnnnnnnnnnnnnnnnnnnnnnnnnnnnnnnnnnnnnnnnnnnnnnnnnnnnnnnnnnnnnnnnnnnnnnnnnnnnnnnnnnnnnnnnnnnnnnnnnnnnnnnnnnnnnnnnnnnnnnnnnnnnnnnnnnnnnnnnnnnnnnnnnnnnnnnnnnnnnnnnnnnnnnnnnnnnnnnnnnnnnnnnnnnnnnnnnnnnnnnnnnnnnnnnnnnnnnnnnnnnnnnnnnnnnnnnnnnnnnnnnnnnnnnnnnnnnnnnnnnnnnnnnnnnnnnnnnnnnnnnnnnnnnnnnnnnnnnnnnnnnnnnnnnnnnnnnnnnnnnnnnnnnnnnnnnnnnnnnnnnnnnnnnnnnnnnnnnnnnnnnnnnnnnnnnnnnnnnnnnnnnnnnnnnnnnnnnnnnnnnnnnnnnnnnnnnnnnnnnnnnnnnnnnnnnnnnnnnnnnnnnnnnnnnnnnnnnnnnnnnnnnnnnnnnnnnnnnnnnnnnnnnnnnnnnnnnnnnnnnnnnnnnnnnnnnnnnnnnnnnnnnnnnnnnnnnnnnnnnnnnnnnnnnnnnnnnnnnnnnnnnnnnnnnnnnnnnnnnnnnnnnnnnnnnnnnnnnnnnnnnnnnnnnnnnnnnnnnnnnnnnnnnnnnnnnnnnnnnnnnnnnnnnnnnnnnnnnnnnnnnnnnnnnnnnnnnnnnnnnnnnnnnnnnnnnnnnnnnnnnnnnnnnnnnnnnnnnnnnnnnnnnnnnnnnnnnnnnnnnnnnnnnnnnnnnnnnnnnnnnnnnnnnnnnnnnnnnnnnnnnnnnnnnnnnnnnnnnnnnnnnnnnnnnnnnnnnnnnnnnnnnnnnnnnnnnnnnnnnnnnnnnnnnnnnnnnnnnnnnnnnnnnnnnnnnnnnnnnnnnnnnnnnnnnnnnnnnnnnnnnnnnnnnnnnnnnnnnnnnnnnnnnnnnnnnnnnnnnnnnnnnnnnnnnnnnnnnnnnnnnnnnnnnnnnnnnnnnnnnnnnnnnnnnnnnnnnnnnnnnnnnnnnnnnnnnnnnnnnnnnnnnnnnnnnnnnnnnnnnnnnnnnnnnnnnnnnnnnnnnnnnnnnnnnnnnnnnnnnnnnnnnnnnnnnnnnnnnnnnnnnnnnnnnnnnnnnnnnnnnnnnnnnnnnnnnnnnnnnnnnnnnnnnnnnnnnnnnnnnnnnnnnnnnnnnnnnnnnnnnnnnnnnnnnnnnnnnnnnnnnnnnnnnnnnnnnnnnnnnnnnnnnnnnnnnnnnnnnnnnnnnnnnnnnnnnnnnnnnnnnnnnnnnnnnnnnnnnnnnnnnnnnnnnnnnnnnnnnnnnnnnnnnnnnnnnnnnnnnnnnnnnnnnnnnnnnnnnnnnnnnnnnnnnnnnnnnnnnnnnnnnnnnnnnnnnnnnnnnnnnnnnnnnnnnnnnnnnnnnnnnnnnnnnnnnnnnnnnnnnnnnnnnnnnnnnnnnnnnnnnnnnnnnnnnnnnnnnnnnnnnnnnnnnnnnnnnnnnnnnnnnnnnnnnnnnnnnnnnnnnnnnnnnnnnnnnnnnnnnnnnnnnnnnnnnnnnnnnnnnnnnnnnnnnnnnnnnnnnnnnnnnnnnnnnnnnnnnnnnnnnnnnnnnnnnnnnnnnnnnnnnnnnnnnnnnnnnnnnnnnnnnnnnnnnnnnnnnnnnnnnnnnnnnnnnnnnnnnnnnnnnnnnnnnnnnnnnnnnnnnnnnnnnnnnnnnnnnnnnnnnnnnnnnnnnnnnnnnnnnnnnnnnnnnnnnnnnnnnnnnnnnnnnnnnnnnnnnnnnnnnnnnnnnnnnnnnnnnnnnnnnnnnnnnnnnnnnnnnnnnnnnnnnnnnnnnnnnnnnnnnnnnnnnnnnnnnnnnnnnnnnnnnnnnnnnnnnnnnnnnnnnnnnnnnnnnnnnnnnnnnnnnnnnnnnnnnnnnnnnnnnnnnnnnnnnnnnnnnnnnnnnnnnnnnnnnnnnnnnnnnnnnnnnnnnnnnnnnnnnnnnnnnnnnnnnnnnnnnnnnnnnnnnnnnnnnnnnnnnnnnnnnnnnnnnnnnnnnnnnnnnnnnnnnnnnnnnnnnnnnnnnnnnnnnnnnnnnnnnnnnnnnnnnnnnnnnnnnnnnnnnnnnnnnnnnnnnnnnnnnnnnnnnnnnnnnnnnnnnnnnnnnnnnnnnnnnnnnnnnnnnnnnnnnnnnnnnnnnnnnnnnnnnnnnnnnnnnnnnnnnnnnnnnnnnnnnnnnnnnnnnnnnnnnnnnnnnnnnnnnnnnnnnnnnnnnnnnnnnnnnnnnnnnnnnnnnnnnnnnnnnnnnnnnnnnnnnnnnnnnnnnnnnnnnnnnnnnnnnnnnnnnnnnnnnnnnnnnnnnnnnnnnnnnnnnnnnnnnnnnnnnnnnnnnnnnnnnnnnnnnnnnnnnnnnnnnnnnnnnnnnnnnnnnnnnnnnnnnnnnnnnnnnnnnnnnnnnnnnnnnnnnnnnnnnnnnnnnnnnnnnnnnnnnnnnnnnnnnnnnnnnnnnnnnnnnnnnnnnnnnnnnnnnnnnnnnnnnnnnnnnnnnnnnnnnnnnnnnnnnnnnnnnnnnnnnnnnnnnnnnnnnnnnnnnnnnnnnnnnnnnnnnnnnnnnnnnnnnnnnnnnnnnnnnnnnnnnnnnnnnnnnnnnnnnnnnnnnnnnnnnnnnnnnnnnnnnnnnnnnnnnnnnnnnnnnnnnnnnnnnnnnnnnnnnnnnnnnnnnnnnnnnnnnnnnnnnnnnnnnnnnnnnnnnnnnnnnnnnnnnnnnnnnnnnnnnnnnnnnnnnnnnnnnnnnnnnnnnnnnnnnnnnnnnnnnnnnnnnnnnnnnnnnnnnnnnnnnnnnnnnnnnnnnnnnnnnnnnnnnnnnnnnnnnnnnnnnnnnnnnnnnnnnnnnnnnnnnnnnnnnnnnnnnnnnnnnnnnnnnnnnnnnnnnnnnnnnnnnnnnnnnnnnnnnnnnnnnnnnnnnnnnnnnnnnnnnnnnnnnnnnnnnnnnnnnnnnnnnnnnnnnnnnnnnnnnnnnnnnnnnnnnnnnnnnnnnnnnnnnnnnnnnnnnnnnnnnnnnnnnnnnnnnnnnnnnnnnnnnnnnnnnnnnnnnnnnnnnnnnnnnnnnnnnnnnnnnnnnnnnnnnnnnnnnnnnnnnnnnnnnnnnnnnnnnnnnnnnnnnnnnnnnnnnnnnnnnnnnnnnnnnnnnnnnnnnnnnnnnnnnnnnnnnnnnnnnnnnnnnnnnnnnnnnnnnnnnnnnnnnnnnnnnnnnnnnnnnnnnnnnnnnnnnnnnnnnnnnnnnnnnnnnnnnnnnnnnnnnnnnnnnnnnnnnnnnnnnnnnnnnnnnnnnnnnnnnnnnnnnnnnnnnnnnnnnnnnnnnnnnnnnnnnnnnnnnnnnnnnnnnnnnnnnnnnnnnnnnnnnnnnnnnnnnnnnnnnnnnnnnnnnnnnnnnnnnnnnnnnnnnnnnnnnnnnnnnnnnnnnnnnnnnnnnnnnnnnnnnnnnnnnnnnnnnnnnnnnnnnnnnnnnnnnnnnnnnnnnnnnnnnnnnnnnnnnnnnnnnnnnnnnnnnnnnnnnnnnnnnnnnnnnnnnnnnnnnnnnnnnnnnnnnnnnnnnnnnnnnnnnnnnnnnnnnnnnnnnnnnnnnnnnnnnnnnnnnnnnnnnnnnnnnnnnnnnnnnnnnnnnnnnnnnnnnnnnnnnnnnnnnnnnnnnnnnnnnnnnnnnnnnnnnnnnnnnnnnnnnnnnnnnnnnnnnnnnnnnnnnnnnnnnnnnnnnnnnnnnnnnnnnnnnnnnnnnnnnnnnnnnnnnnnnnnnnnnnnnnnnnnnnnnnnnnnnnnnnnnnnnnnnnnnnnnnnnnnnnnnnnnnnnnnnnnnnnnnnnnnnnnnnnnnnnnnnnnnnnnnnnnnnnnnnnnnnnnnnnnnnnnnnnnnnnnnnnnnnnnnnnnnnnnnnnnnnnnnnnnnnnnnnnnnnnnnnnnnnnnnnnnnnnnnnnnnnnnnnnnnnnnnnnnnnnnnnnnnnnnnnnnnnnnnnnnnnnnnnnnnnnnnnnnnnnnnnnnnnnnnnnnnnnnnnnnnnnnnnnnnnnnnnnnnnnnnnnnnnnnnnnnnnnnnnnnnnnnnnnnnnnnnnnnnnnnnnnnnnnnnnnnnnnnnnnnnnnnnnnnnnnnnnnnnnnnnnnnnnnnnnnnnnnnnnnnnnnnnnnnnnnnnnnnnnnnnnnnnnnnnnnnnnnnnnnnnnnnnnnnnnnnnnnnnnnnnnnnnnnnnnnnnnnnnnnnnnnnnnnnnnnnnnnnnnnnnnnnnnnnnnnnnnnnnnnnnnnnnnnnnnnnnnnnnnnnnnnnnnnnnnnnnnnnnnnnnnnnnnnnnnnnnnnnnnnnnnnnnnnnnnnnnnnnnnnnnnnnnnnnnnnnnnnnnnnnnnnnnnnnnnnnnnnnnnnnnnnnnnnnnnnnnnnnnnnnnnnnnnnnnnnnnnnnnnnnnnnnnnnnnnnnnnnnnnnnnnnnnnnnnnnnnnnnnnnnnnnnnnnnnnnnnnnnnnnnnnnnnnnnnnnnnnnnnnnnnnnnnnnnnnnnnnnnnnnnnnnnnnnnnnnnnnnnnnnnnnnnnnnnnnnnnnnnnnnnnnnnnnnnnnnnnnnnnnnnnnnnnnnnnnnnnnnnnnnnnnnnnnnnnnnnnnnnnnnnnnnnnnnnnnnnnnnnnnnnnnnnnnnnnnnnnnnnnnnnnnnnnnnnnnnnnnnnnnnnnnnnnnnnnnnnnnnnnnnnnnnnnnnnnnnnnnnnnnnnnnnnnnnnnnnnnnnnnnnnnnnnnnnnnnnnnnnnnnnnnnnnnnnnnnnnnnnnnnnnnnnnnnnnnnnnnnnnnnnnnnnnnnnnnnnnnnnnnnnnnnnnnnnnnnnnnnnnnnnnnnnnnnnnnnnnnnnnnnnnnnnnnnnnnnnnnnnnnnnnnnnnnnnnnnnnnnnnnnnnnnnnnnnnnnnnnnnnnnnnnnnnnnnnnnnnnnnnnnnnnnnnnnnnnnnnnnnnnnnnnnnnnnnnnnnnnnnnnnnnnnnnnnnnnnnnnnnnnnnnnnnnnnnnnnnnnnnnnnnnnnnnnnnnnnnnnnnnnnnnnnnnnnnnnnnnnnnnnnnnnnnnnnnnnnnnnnnnnnnnnnnnnnnnnnnnnnnnnnnnnnnnnnnnnnnnnnnnnnnnnnnnnnnnnnnnnnnnnnnnnnnnnnnnnnnnnnnnnnnnnnnnnnnnnnnnnnnnnnnnnnnnnnnnnnnnnnnnnnnnnnnnnnnnnnnnnnnnnnnnnnnnnnnnnnnnnnnnnnnnnnnnnnnnnnnnnnnnnnnnnnnnnnnnnnnnnnnnnnnnnnnnnnnnnnnnnnnnnnnnnnnnnnnnnnnnnnnnnnnnnnnnnnnnnnnnnnnnnnnnnnnnnnnnnnnnnnnnnnnnnnnnnnnnnnnnnnnnnnnnnnnnnnnnnnnnnnnnnnnnnnnnnnnnnnnnnnnnnnnnnnnnnnnnnnnnnnnnnnnnnnnnnnnnnnnnnnnnnnnnnnnnnnnnnnnnnnnnnnnnnnnnnnnnnnnnnnnnnnnnnnnnnnnnnnnnnnnnnnnnnnnnnnnnnnnnnnnnnnnnnnnnnnnnnnnnnnnnnnnnnnnnnnnnnnnnnnnnnnnnnnnnnnnnnnnnnnnnnnnnnnnnnnnnnnnnnnnnnnnnnnnnnnnnnnnnnnnnnnnnnnnnnnnnnnnnnnnnnnnnnnnnnnnnnnnnnnnnnnnnnnnnnnnnnnnnnnnnnnnnnnnnnnnnnnnnnnnnnnnnnnnnnnnnnnnnnnnnnnnnnnnnnnnnnnnnnnnnnnnnnnnnnnnnnnnnnnnnnnnnnnnnnnnnnnnnnnnnnnnnnnnnnnnnnnnnnnnnnnnnnnnnnnnnnnnnnnnnnnnnnnnnnnnnnnnnnnnnnnnnnnnnnnnnnnnnnnnnnnnnnnnnnnnnnnnnnnnnnnnnnnnnnnnnnnnnnnnnnnnnnnnnnnnnnnnnnnnnnnnnnnnnnnnnnnnnnnnnnnnnnnnnnnnnnnnnnnnnnnnnnnnnnnnnnnnnnnnnnnnnnnnnnnnnnnnnnnnnnnnnnnnnnnnnnnnnnnnnnnnnnnnnnnnnnnnnnnnnnnnnnnnnnnnnnnnnnnnnnnnnnnnnnnnnnnnnnnnnnnnnnnnnnnnnnnnnnnnnnnnnnnnnnnnnnnnnnnnnnnnnnnnnnnnnnnnnnnnnnnnnnnnnnnnnnnnnnnnnnnnnnnnnnnnnnnnnnnnnnnnnnnnnnnnnnnnnnnnnnnnnnnnnnnnnnnnnnnnnnnnnnnnnnnnnnnnnnnnnnnnnnnnnnnnnnnnnnnnnnnnnnnnnnnnnnnnnnnnnnnnnnnnnnnnnnnnnnnnnnnnnnnnnnnnnnnnnnnnnnnnnnnnnnnnnnnnnnnnnnnnnnnnnnnnnnnnnnnnnnnnnnnnnnnnnnnnnnnnnnnnnnnnnnnnnnnnnnnnnnnnnnnnnnnnnnnnnnnnnnnnnnnnnnnnnnnnnnnnnnnnnnnnnnnnnnnnnnnnnnnnnnnnnnnnnnnnnnnnnnnnnnnnnnnnnnnnnnnnnnnnnnnnnnnnnnnnnnnnnnnnnnnnnnnnnnnnnnnnnnnnnnnnnnnnnnnnnnnnnnnnnnnnnnnnnnnnnnnnnnnnnnnnnnnnnnnnnnnnnnnnnnnnnnnnnnnnnnnnnnnnnnnnnnnnnnnnnnnnnnnnnnnnnnnnnnnnnnnnnnnnnnnnnnnnnnnnnnnnnnnnnnnnnnnnnnnnnnnnnnnnnnnnnnnnnnnnnnnnnnnnnnnnnnnnnnnnnnnnnnnnnnnnnnnnnnnnnnnnnnnnnnnnnnnnnnnnnnnnnnnnnnnnnnnnnnnnnnnnnnnnnnnnnnnnnnnnnnnnnnnnnnnnnnnnnnnnnnnnnnnnnnnnnnnnnnnnnnnnnnnnnnnnnnnnnnnnnnnnnnnnnnnnnnnnnnnnnnnnnnnnnnnnnnnnnnnnnnnnnnnnnnnnnnnnnnnnnnnnnnnnnnnnnnnnnnnnnnnnnnnnnnnnnnnnnnnnnnnnnnnnnnnnnnnnnnnnnnnnnnnnnnnnnnnnnnnnnnnnnnnnnnnnnnnnnnnnnnnnnnnnnnnnnnnnnnnnnnnnnnnnnnnnnnnnnnnnnnnnnnnnnnnnnnnnnnnnnnnnnnnnnnnnnnnnnnnnnnnnnnnnnnnnnnnnnnnnnnnnnnnnnnnnnnnnnnnnnnnnnnnnnnnnnnnnnnnnnnnnnnnnnnnnnnnnnnnnnnnnnnnnnnnnnnnnnnnnnnnnnnnnnnnnnnnnnnnnnnnnnnnnnnnnnnnnnnnnnnnnnnnnnnnnnnnnnnnnnnnnnnnnnnnnnnnnnnnnnnnnnnnnnnnnnnnnnnnnnnnnnnnnnnnnnnnnnnnnnnnnnnnnnnnnnnnnnnnnnnnnnnnnnnnnnnnnnnnnnnnnnnnnnnnnnnnnnnnnnnnnnnnnnnnnnnnnnnnnnnnnnnnnnnnnnnnnnnnnnnnnnnnnnnnnnnnnnnnnnnnnnnnnnnnnnnnnnnnnnnnnnnnnnnnnnnnnnnnnnnnnnnnnnnnnnnnnnnnnnnnnnnnnnnnnnnnnnnnnnnnnnnnnnnnnnnnnnnnnnnnnnnnnnnnnnnnnnnnnnnnnnnnnnnnnnnnnnnnnnnnnnnnnnnnnnnnnnnnnnnnnnnnnnnnnnnnnnnnnnnnnnnnnnnnnnnnnnnnnnnnnnnnnnnnnnnnnnnnnnnnnnnnnnnnnnnnnnnnnnnnnnnnnnnnnnnnnnnnnnnnnnnnnnnnnnnnnnnnnnnnnnnnnnnnnnnnnnnnnnnnnnnnnnnnnnnnnnnnnnnnnnnnnnnnnnnnnnnnnnnnnnnnnnnnnnnnnnnnnnnnnnnnnnnnnnnnnnnnnnnnnnnnnnnnnnnnnnnnnnnnnnnnnnnnnnnnnnnnnnnnnnnnnnnnnnnnnnnnnnnnnnnnnnnnnnnnnnnnnnnnnnnnnnnnnnnnnnnnnnnnnnnnnnnnnnnnnnnnnnnnnnnnnnnnnnnnnnnnnnnnnnnnnnnnnnnnnnnnnnnnnnnnnnnnnnnnnnnnnnnnnnnnnnnnnnnnnnnnnnnnnnnnnnnnnnnnnnnnnnnnnnnnnnnnnnnnnnnnnnnnnnnnnnnnnnnnnnnnnnnnnnnnnnnnnnnnnnnnnnnnnnnnnnnnnnnnnnnnnnnnnnnnnnnnnnnnnnnnnnnnnnnnnnnnnnnnnnnnnnnnnnnnnnnnnnnnnnnnnnnnnnnnnnnnnnnnnnnnnnnnnnnnnnnnnnnnnnnnnnnnnnnnnnnnnnnnnnnnnnnnnnnnnnnnnnnnnnnnnnnnnnnnnnnnnnnnnnnnnnnnnnnnnnnnnnnnnnnnnnnnnnnnnnnnnnnnnnnnnnnnnnnnnnnnnnnnnnnnnnnnnnnnnnnnnnnnnnnnnnnnnnnnnnnnnnnnnnnnnnnnnnnnnnnnnnnnnnnnnnnnnnnnnnnnnnnnnnnnnnnnnnnnnnnnnnnnnnnnnnnnnnnnnnnnnnnnnnnnnnnnnnnnnnnnnnnnnnnnnnnnnnnnnnnnnnnnnnnnnnnnnnnnnnnnnnnnnnnnnnnnnnnnnnnnnnnnnnnnnnnnnnnnnnnnnnnnnnnnnnnnnnnnnnnnnnnnnnnnnnnnnnnnnnnnnnnnnnnnnnnnnnnnnnnnnnnnnnnnnnnnnnnnnnnnnnnnnnnnnnnnnnnnnnnnnnnnnnnnnnnnnnnnnnnnnnnnnnnnnnnnnnnnnnnnnnnnnnnnnnnnnnnnnnnnnnnnnnnnnnnnnnnnnnnnnnnnnnnnnnnnnnnnnnnnnnnnnnnnnnnnnnnnnnnnnnnnnnnnnnnnnnnnnnnnnnnnnnnnnnnnnnnnnnnnnnnnnnnnnnnnnnnnnnnnnnnnnnnnnnnnnnnnnnnnnnnnnnnnnnnnnnnnnnnnnnnnnnnnnnnnnnnnnnnnnnnnnnnnnnnnnnnnnnnnnnnnnnnnnnnnnnnnnnnnnnnnnnnnnnnnnnnnnnnnnnnnnnnnnnnnnnnnnnnnnnnnnnnnnnnnnnnnnnnnnnnnnnnnnnnnnnnnnnnnnnnnnnnnnnnnnnnnnnnnnnnnnnnnnnnnnnnnnnnnnnnnnnnnnnnnnnnnnnnnnnnnnnnnnnnnnnnnnnnnnnnnnnnnnnnnnnnnnnnnnnnnnnnnnnnnnnnnnnnnnnnnnnnnnnnnnnnnnnnnnnnnnnnnnnnnnnnnnnnnnnnnnnnnnnnnnnnnnnnnnnnnnnnnnnnnnnnnnnnnnnnnnnnnnnnnnnnnnnnnnnnnnnnnnnnnnnnnnnnnnnnnnnnnnnnnnnnnnnnnnnnnnnnnnnnnnnnnnnnnnnnnnnnnnnnnnnnnnnnnnnnnnnnnnnnnnnnnnnnnnnnnnnnnnnnnnnnnnnnnnnnnnnnnnnnnnnnnnnnnnnnnnnnnnnnnnnnnnnnnnnnnnnnnnnnnnnnnnnnnnnnnnnnnnnnnnnnnnnnnnnnnnnnnnnnnnnnnnnnnnnnnnnnnnnnnnnnnnnnnnnnnnnnnnnnnnnnnnnnnnnnnnnnnnnnnnnnnnnnnnnnnnnnnnnnnnnnnnnnnnnnnnnnnnnnnnnnnnnnnnnnnnnnnnnnnnnnnnnnnnnnnnnnnnnnnnnnnnnnnnnnnnnnnnnnnnnnnnnnnnnnnnnnnnnnnnnnnnnnnnnnnnnnnnnnnnnnnnnnnnnnnnnnnnnnnnnnnnnnnnnnnnnnnnnnnnnnnnnnnnnnnnnnnnnnnnnnnnnnnnnnnnnnnnnnnnnnnnnnnnnnnnnnnnnnnnnnnnnnnnnnnnnnnnnnnnnnnnnnnnnnnnnnnnnnnnnnnnnnnnnnnnnnnnnnnnnnnnnnnnnnnnnnnnnnnnnnnnnnnnnnnnnnnnnnnnnnnnnnnnnnnnnnnnnnnnnnnnnnnnnnnnnnnnnnnnnnnnnnnnnnnnnnnnnnnnnnnnnnnnnnnnnnnnnnnnnnnnnnnnnnnnnnnnnnnnnnnnnnnnnnnnnnnnnnnnnnnnnnnnnnnnnnnnnnnnnnnnnnnnnnnnnnnnnnnnnnnnnnnnnnnnnnnnnnnnnnnnnnnnnnnnnnnnnnnnnnnnnnnnnnnnnnnnnnnnnnnnnnnnnnnnnnnnnnnnnnnnnnnnnnnnnnnnnnnnnnnnnnnnnnnnnnnnnnnnnnnnnnnnnnnnnnnnnnnnnnnnnnnnnnnnnnnnnnnnnnnnnnnnnnnnnnnnnnnnnnnnnnnnnnnnnnnnnnnnnnnnnnnnnnnnnnnnnnnnnnnnnnnnnnnnnnnnnnnnnnnnnnnnnnnnnnnnnnnnnnnnnnnnnnnnnnnnnnnnnnnnnnnnnnnnnnnnnnnnnnnnnnnnnnnnnnnnnnnnnnnnnnnnnnnnnnnnnnnnnnnnnnnnnnnnnnnnnnnnnnnnnnnnnnnnnnnnnnnnnnnnnnnnnnnnnnnnnnnnnnnnnnnnnnnnnnnnnnnnnnnnnnnnnnnnnnnnnnnnnnnnnnnnnnnnnnnnnnnnnnnnnnnnnnnnnnnnnnnnnnnnnnnnnnnnnnnnnnnnnnnnnnnnnnnnnnnnnnnnnnnnnnnnnnnnnnnnnnnnnnnnnnnnnnnnnnnnnnnnnnnnnnnnnnnnnnnnnnnnnnnnnnnnnnnnnnnnnnnnnnnnnnnnnnnnnnnnnnnnnnnnnnnnnnnnnnnnnnnnnnnnnnnnnnnnnnnnnnnnnnnnnnnnnnnnnnnnnnnnnnnnnnnnnnnnnnnnnnnnnnnnnnnnnnnnnnnnnnnnnnnnnnnnnnnnnnnnnnnnnnnnnnnnnnnnnnnnnnnnnnnnnnnnnnnnnnnnnnnnnnnnnnnnnnnnnnnnnnnnnnnnnnnnnnnnnnnnnnnnnnnnnnnnnnnnnnnnnnnnnnnnnnnnnnnnnnnnnnnnnnnnnnnnnnnnnnnnnnnnnnnnnnnnnnnnnnnnnnnnnnnnnnnnnnnnnnnnnnnnnnnnnnnnnnnnnnnnnnnnnnnnnnnnnnnnnnnnnnnnnnnnnnnnnnnnnnnnnnnnnnnnnnnnnnnnnnnnnnnnnnnnnnnnnnnnnnnnnnnnnnnnnnnnnnnnnnnnnnnnnnnnnnnnnnnnnnnnnnnnnnnnnnnnnnnnnnnnnnnnnnnnnnnnnnnnnnnnnnnnnnnnnnnnnnnnnnnnnnnnnnnnnnnnnnnnnnnnnnnnnnnnnnnnnnnnnnnnnnnnnnnnnnnnnnnnnnnnnnnnnnnnnnnnnnnnnnnnnnnnnnnnnnnnnnnnnnnnnnnnnnnnnnnnnnnnnnnnnnnnnnnnnnnnnnnnnnnnnnnnnnnnnnnnnnnnnnnnnnnnnnnnnnnnnnnnnnnnnnnnnnnnnnnnnnnnnnnnnnnnnnnnnnnnnnnnnnnnnnnnnnnnnnnnnnnnnnnnnnnnnnnnnnnnnnnnnnnnnnnnnnnnnnnnnnnnnnnnnnnnnnnnnnnnnnnnnnnnnnnnnnnnnnnnnnnnnnnnnnnnnnnnnnnnnnnnnnnnnnnnnnnnnnnnnnnnnnnnnnnnnnnnnnnnnnnnnnnnnnnnnnnnnnnnnnnnnnnnnnnnnnnnnnnnnnnnnnnnnnnnnnnnnnnnnnnnnnnnnnnnnnnnnnnnnnnnnnnnnnnnnnnnnnnnnnnnnnnnnnnnnnnnnnnnnnnnnnnnnnnnnnnnnnnnnnnnnnnnnnnnnnnnnnnnnnnnnnnnnnnnnnnnnnnnnnnnnnnnnnnnnnnnnnnnnnnnnnnnnnnnnnnnnnnnnnnnnnnnnnnnnnnnnnnnnnnnnnnnnnnnnnnnnnnnnnnnnnnnnnnnnnnnnnnnnnnnnnnnnnnnnnnnnnnnnnnnnnnnnnnnnnnnnnnnnnnnnnnnnnnnnnnnnnnnnnnnnnnnnnnnnnnnnnnnnnnnnnnnnnnnnnnnnnnnnnnnnnnnnnnnnnnnnnnnnnnnnnnnnnnnnnnnnnnnnnnnnnnnnnnnnnnnnnnnnnnnnnnnnnnnnnnnnnnnnnnnnnnnnnnnnnnnnnnnnnnnnnnnnnnnnnnnnnnnnnnnnnnnnnnnnnnnnnnnnnnnnnnnnnnnnnnnnnnnnnnnnnnnnnnnnnnnnnnnnnnnnnnnnnnnnnnnnnnnnnnnnnnnnnnnnnnnnnnnnnnnnnnnnnnnnnnnnnnnnnnnnnnnnnnnnnnnnnnnnnnnnnnnnnnnnnnnnnnnnnnnnnnnnnnnnnnnnnnnnnnnnnnnnnnnnnnnnnnnnnnnnnnnnnnnnnnnnnnnnnnnnnnnnnnnnnnnnnnnnnnnnnnnnnnnnnnnnnnnnnnnnnnnnnnnnnnnnnnnnnnnnnnnnnnnnnnnnnnnnnnnnnnnnnnnnnnnnnnnnnnnnnnnnnnnnnnnnnnnnnnnnnnnnnnnnnnnnnnnnnnnnnnnnnnnnnnnnnnnnnnnnnnnnnnnnnnnnnnnnnnnnnnnnnnnnnnnnnnnnnnnnnnnnnnnnnnnnnnnnnnnnnnnnnnnnnnnnnnnnnnnnnnnnnnnnnnnnnnnnnnnnnnnnnnnnnnnnnnnnnnnnnnnnnnnnnnnnnnnnnnnnnnnnnnnnnnnnnnnnnnnnnnnnnnnnnnnnnnnnnnnnnnnnnnnnnnnnnnnnnnnnnnnnnnnnnnnnnnnnnnnnnnnnnnnnnnnnnnnnnnnnnnnnnnnnnnnnnnnnnnnnnnnnnnnnnnnnnnnnnnnnnnnnnnnnnnnnnnnnnnnnnnnnnnnnnnnnnnnnnnnnnnnnnnnnnnnnnnnnnnnnnnnnnnnnnnnnnnnnnnnnnnnnnnnnnnnnnnnnnnnnnnnnnnnnnnnnnnnnnnnnnnnnnnnnnnnnnnnnnnnnnnnnnnnnnnnnnnnnnnnnnnnnnnnnnnnnnnnnnnnnnnnnnnnnnnnnnnnnnnnnnnnnnnnnnnnnnnnnnnnnnnnnnnnnnnnnnnnnnnnnnnnnnnnnnnnnnnnnnnnnnnnnnnnnnnnnnnnnnnnnnnnnnnnnnnnnnnnnnnnnnnnnnnnnnnnnnnnnnnnnnnnnnnnnnnnnnnnnnnnnnnnnnnnnnnnnnnnnnnnnnnnnnnnnnnnnnnnnnnnnnnnnnnnnnnnnnnnnnnnnnnnnnnnnnnnnnnnnnnnnnnnnnnnnnnnnnnnnnnnnnnnnnnnnnnnnnnnnnnnnnnnnnnnnnnnnnnnnnnnnnnnnnnnnnnnnnnnnnnnnnnnnnnnnnnnnnnnnnnnnnnnnnnnnnnnnnnnnnnnnnnnnnnnnnnnnnnnnnnnnnnnnnnnnnnnnnnnnnnnnnnnnnnnnnnnnnnnnnnnnnnnnnnnnnnnnnnnnnnnnnnnnnnnnnnnnnnnnnnnnnnnnnnnnnnnnnnnnnnnnnnnnnnnnnnnnnnnnnnnnnnnnnnnnnnnnnnnnnnnnnnnnnnnnnnnnnnnnnnnnnnnnnnnnnnnnnnnnnnnnnnnnnnnnnnnnnnnnnnnnnnnnnnnnnnnnnnnnnnnnnnnnnnnnnnnnnnnnnnnnnnnnnnnnnnnnnnnnnnnnnnnnnnnnnnnnnnnnnnnnnnnnnnnnnnnnnnnnnnnnnnnnnnnnnnnnnnnnnnnnnnnnnnnnnnnnnnnnnnnnnnnnnnnnnnnnnnnnnnnnnnnnnnnnnnnnnnnnnnnnnnnnnnnnnnnnnnnnnnnnnnnnnnnnnnnnnnnnnnnnnnnnnnnnnnnnnnnnnnnnnnnnnnnnnnnnnnnnnnnnnnnnnnnnnnnnnnnnnnnnnnnnnnnnnnnnnnnnnnnnnnnnnnnnnnnnnnnnnnnnnnnnnnnnnnnnnnnnnnnnnnnnnnnnnnnnnnnnnnnnnnnnnnnnnnnnnnnnnnnnnnnnnnnnnnnnnnnnnnnnnnnnnnnnnnnnnnnnnnnnnnnnnnnnnnnnnnnnnnnnnnnnnnnnnnnnnnnnnnnnnnnnnnnnnnnnnnnnnnnnnnnnnnnnnnnnnnnnnnnnnnnnnnnnnnnnnnnnnnnnnnnnnnnnnnnnnnnnnnnnnnnnnnnnnnnnnnnnnnnnnnnnnnnnnnnnnnnnnnnnnnnnnnnnnnnnnnnnnnnnnnnnnnnnnnnnnnnnnnnnnnnnnnnnnnnnnnnnnnnnnnnnnnnnnnnnnnnnnnnnnnnnnnnnnnnnnnnnnnnnnnnnnnnnnnnnnnnnnnnnnnnnnnnnnnnnnnnnnnnnnnnnnnnnnnnnnnnnnnnnnnnnnnnnnnnnnnnnnnnnnnnnnnnnnnnnnnnnnnnnnnnnnnnnnnnnnnnnnnnnnnnnnnnnnnnnnnnnnnnnnnnnnnnnnnnnnnnnnnnnnnnnnnnnnnnnnnnnnnnnnnnnnnnnnnnnnnnnnnnnnnnnnnnnnnnnnnnnnnnnnnnnnnnnnnnnnnnnnnnnnnnnnnnnnnnnnnnnnnnnnnnnnnnnnnnnnnnnnnnnnnnnnnnnnnnnnnnnnnnnnnnnnnnnnnnnnnnnnnnnnnnnnnnnnnnnnnnnnnnnnnnnnnnnnnnnnnnnnnnnnnnnnnnnnnnnnnnnnnnnnnnnnnnnnnnnnnnnnnnnnnnnnnnnnnnnnnnnnnnnnnnnnnnnnnnnnnnnnnnnnnnnnnnnnnnnnnnnnnnnnnnnnnnnnnnnnnnnnnnnnnnnnnnnnnnnnnnnnnnnnnnnnnnnnnnnnnnnnnnnnnnnnnnnnnnnnnnnnnnnnnnnnnnnnnnnnnnnnnnnnnnnnnnnnnnnnnnnnnnnnnnnnnnnnnnnnnnnnnnnnnnnnnnnnnnnnnnnnnnnnnnnnnnnnnnnnnnnnnnnnnnnnnnnnnnnnnnnnnnnnnnnnnnnnnnnnnnnnnnnnnnnnnnnnnnnnnnnnnnnnnnnnnnnnnnnnnnnnnnnnnnnnnnnnnnnnnnnnnnnnnnnnnnnnnnnnnnnnnnnnnnnnnnnnnnnnnnnnnnnnnnnnnnnnnnnnnnnnnnnnnnnnnnnnnnnnnnnnnnnnnnnnnnnnnnnnnnnnnnnnnnnnnnnnnnnnnnnnnnnnnnnnnnnnnnnnnnnnnnnnnnnnnnnnnnnnnnnnnnnnnnnnnnnnnnnnnnnnnnnnnnnnnnnnnnnnnnnnnnnnnnnnnnnnnnnnnnnnnnnnnnnnnnnnnnnnnnnnnnnnnnnnnnnnnnnnnnnnnnnnnnnnnnnnnnnnnnnnnnnnnnnnnnnnnnnnnnnnnnnnnnnnnnnnnnnnnnnnnnnnnnnnnnnnnnnnnnnnnnnnnnnnnnnnnnnnnnnnnnnnnnnnnnnnnnnnnnnnnnnnnnnnnnnnnnnnnnnnnnnnnnnnnnnnnnnnnnnnnnnnnnnnnnnnnnnnnnnnnnnnnnnnnnnnnnnnnnnnnnnnnnnnnnnnnnnnnnnnnnnnnnnnnnnnnnnnnnnnnnnnnnnnnnnnnnnnnnnnnnnnnnnnnnnnnnnnnnnnnnnnnnnnnnnnnnnnnnnnnnnnnnnnnnnnnnnnnnnnnnnnnnnnnnnnnnnnnnnnnnnnnnnnnnnnnnnnnnnnnnnnnnnnnnnnnnnnnnnnnnnnnnnnnnnnnnnnnnnnnnnnnnnnnnnnnnnnnnnnnnnnnnnnnnnnnnnnnnnnnnnnnnnnnnnnnnnnnnnnnnnnnnnnnnnnnnnnnnnnnnnnnnnnnnnnnnnnnnnnnnnnnnnnnnnnnnnnnnnnnnnnnnnnnnnnnnnnnnnnnnnnnnnnnnnnnnnnnnnnnnnnnnnnnnnnnnnnnnnnnnnnnnnnnnnnnnnnnnnnnnnnnnnnnnnnnnnnnnnnnnnnnnnnnnnnnnnnnnnnnnnnnnnnnnnnnnnnnnnnnnnnnnnnnnnnnnnnnnnnnnnnnnnnnnnnnnnnnnnnnnnnnnnnnnnnnnnnnnnnnnnnnnnnnnnnnnnnnnnnnnnnnnnnnnnnnnnnnnnnnnnnnnnnnnnnnnnnnnnnnnnnnnnnnnnnnnnnnnnnnnnnnnnnnnnnnnnnnnnnnnnnnnnnnnnnnnnnnnnnnnnnnnnnnnnnnnnnnnnnnnnnnnnnnnnnnnnnnnnnnnnnnnnnnnnnnnnnnnnnnnnnnnnnnnnnnnnnnnnnnnnnnnnnnnnnnnnnnnnnnnnnnnnnnnnnnnnnnnnnnnnnnnnnnnnnnnnnnnnnnnnnnnnnnnnnnnnnnnnnnnnnnnnnnnnnnnnnnnnnnnnnnnnnnnnnnnnnnnnnnnnnnnnnnnnnnnnnnnnnnnnnnnnnnnnnnnnnnnnnnnnnnnnnnnnnnnnnnnnnnnnnnnnnnnnnnnnnnnnnnnnnnnnnnnnnnnnnnnnnnnnnnnnnnnnnnnnnnnnnnnnnnnnnnnnnnnnnnnnnnnnnnnnnnnnnnnnnnnnnnnnnnnnnnnnnnnnnnnnnnnnnnnnnnnnnnnnnnnnnnnnnnnnnnnnnnnnnnnnnnnnnnnnnnnnnnnnnnnnnnnnnnnnnnnnnnnnnnnnnnnnnnnnnnnnnnnnnnnnnnnnnnnnnnnnnnnnnnnnnnnnnnnnnnnnnnnnnnnnnnnnnnnnnnnnnnnnnnnnnnnnnnnnnnnnnnnnnnnnnnnnnnnnnnnnnnnnnnnnnnnnnnnnnnnnnnnnnnnnnnnnnnnnnnnnnnnnnnnnnnnnnnnnnnnnnnnnnnnnnnnnnnnnnnnnnnnnnnnnnnnnnnnnnnnnnnnnnnnnnnnnnnnnnnnnnnnnnnnnnnnnnnnnnnnnnnnnnnnnnnnnnnnnnnnnnnnnnnnnnnnnnnnnnnnnnnnnnnnnnnnnnnnnnnnnnnnnnnnnnnnnnnnnnnnnnnnnnnnnnnnnnnnnnnnnnnnnnnnnnnnnnnnnnnnnnnnnnnnnnnnnnnnnnnnnnnnnnnnnnnnnnnnnnnnnnnnnnnnnnnnnnnnnnnnnnnnnnnnnnnnnnnnnnnnnnnnnnnnnnnnnnnnnnnnnnnnnnnnnnnnnnnnnnnnnnnnnnnnnnnnnnnnnnnnnnnnnnnnnnnnnnnnnnnnnnnnnnnnnnnnnnnnnnnnnnnnnnnnnnnnnnnnnnnnnnnnnnnnnnnnnnnnnnnnnnnnnnnnnnnnnnnnnnnnnnnnnnnnnnnnnnnnnnnnnnnnnnnnnnnnnnnnnnnnnnnnnnnnnnnnnnnnnnnnnnnnnnnnnnnnnnnnnnnnnnnnnnnnnnnnnnnnnnnnnnnnnnnnnnnnnnnnnnnnnnnnnnnnnnnnnnnnnnnnnnnnnnnnnnnnnnnnnnnnnnnnnnnnnnnnnnnnnnnnnnnnnnnnnnnnnnnnnnnnnnnnnnnnnnnnnnnnnnnnnnnnnnnnnnnnnnnnnnnnnnnnnnnnnnnnnnnnnnnnnnnnnnnnnnnnnnnnnnnnnnnnnnnnnnnnnnnnnnnnnnnnnnnnnnnnnnnnnnnnnnnnnnnnnnnnnnnnnnnnnnnnnnnnnnnnnnnnnnnnnnnnnnnnnnnnnnnnnnnnnnnnnnnnnnnnnnnnnnnnnnnnnnnnnnnnnnnnnnnnnnnnnnnnnnnnnnnnnnnnnnnnnnnnnnnnnnnnnnnnnnnnnnnnnnnnnnnnnnnnnnnnnnnnnnnnnnnnnnnnnnnnnnnnnnnnnnnnnnnnnnnnnnnnnnnnnnnnnnnnnnnnnnnnnnnnnnnnnnnnnnnnnnnnnnnnnnnnnnnnnnnnnnnnnnnnnnnnnnnnnnnnnnnnnnnnnnnnnnnnnnnnnnnnnnnnnnnnnnnnnnnnnnnnnnnnnnnnnnnnnnnnnnnnnnnnnnnnnnnnnnnnnnnnnnnnnnnnnnnnnnnnnnnnnnnnnnnnnnnnnnnnnnnnnnnnnnnnnnnnnnnnnnnnnnnnnnnnnnnnnnnnnnnnnnnnnnnnnnnnnnnnnnnnnnnnnnnnnnnnnnnnnnnnnnnnnnnnnnnnnnnnnnnnnnnnnnnnnnnnnnnnnnnnnnnnnnnnnnnnnnnnnnnnnnnnnnnnnnnnnnnnnnnnnnnnnnnnnnnnnnnnnnnnnnnnnnnnnnnnnnnnnnnnnnnnnnnnnnnnnnnnnnnnnnnnnnnnnnnnnnnnnnnnnnnnnnnnnnnnnnnnnnnnnnnnnnnnnnnnnnnnnnnnnnnnnnnnnnnnnnnnnnnnnnnnnnnnnnnnnnnnnnnnnnnnnnnnnnnnnnnnnnnnnnnnnnnnnnnnnnnnnnnnnnnnnnnnnnnnnnnnnnnnnnnnnnnnnnnnnnnnnnnnnnnnnnnnnnnnnnnnnnnnnnnnnnnnnnnnnnnnnnnnnnnnnnnnnnnnnnnnnnnnnnnnnnnnnnnnnnnnnnnnnnnnnnnnnnnnnnnnnnnnnnnnnnnnnnnnnnnnnnnnnnnnnnnnnnnnnnnnnnnnnnnnnnnnnnnnnnnnnnnnnnnnnnnnnnnnnnnnnnnnnnnnnnnnnnnnnnnnnnnnnnnnnnnnnnnnnnnnnnnnnnnnnnnnnnnnnnnnnnnnnnnnnnnnnnnnnnnnnnnnnnnnnnnnnnnnnnnnnnnnnnnnnnnnnnnnnnnnnnnnnnnnnnnnnnnnnnnnnnnnnnnnnnnnnnnnnnnnnnnnnnnnnnnnnnnnnnnnnnnnnnnnnnnnnnnnnnnnnnnnnnnnnnnnnnnnnnnnnnnnnnnnnnnnnnnnnnnnnnnnnnnnnnnnnnnnnnnnnnnnnnnnnnnnnnnnnnnnnnnnnnnnnnnnnnnnnnnnnnnnnnnnnnnnnnnnnnnnnnnnnnnnnnnnnnnnnnnnnnnnnnnnnnnnnnnnnnnnnnnnnnnnnnnnnnnnnnnnnnnnnnnnnnnnnnnnnnnnnnnnnnnnnnnnnnnnnnnnnnnnnnnnnnnnnnnnnnnnnnnnnnnnnnnnnnnnnnnnnnnnnnnnnnnnnnnnnnnnnnnnnnnnnnnnnnnnnnnnnnnnnnnnnnnnnnnnnnnnnnnnnnnnnnnnnnnnnnnnnnnnnnnnnnnnnnnnnnnnnnnnnnnnnnnnnnnnnnnnnnnnnnnnnnnnnnnnnnnnnnnnnnnnnnnnnnnnnnnnnnnnnnnnnnnnnnnnnnnnnnnnnnnnnnnnnnnnnnnnnnnnnnnnnnnnnnnnnnnnnnnnnnnnnnnnnnnnnnnnnnnnnnnnnnnnnnnnnnnnnnnnnnnnnnnnnnnnnnnnnnnnnnnnnnnnnnnnnnnnnnnnnnnnnnnnnnnnnnnnnnnnnnnnnnnnnnnnnnnnnnnnnnnnnnnnnnnnnnnnnnnnnnnnnnnnnnnnnnnnnnnnnnnnnnnnnnnnnnnnnnnnnnnnnnnnnnnnnnnnnnnnnnnnnnnnnnnnnnnnnnnnnnnnnnnnnnnnnnnnnnnnnnnnnnnnnnnnnnnnnnnnnnnnnnnnnnnnnnnnnnnnnnnnnnnnnnnnnnnnnnnnnnnnnnnnnnnnnnnnnnnnnnnnnnnnnnnnnnnnnnnnnnnnnnnnnnnnnnnnnnnnnnnnnnnnnnnnnnnnnnnnnnnnnnnnnnnnnnnnnnnnnnnnnnnnnnnnnnnnnnnnnnnnnnnnnnnnnnnnnnnnnnnnnnnnnnnnnnnnnnnnnnnnnnnnnnnnnnnnnnnnnnnnnnnnnnnnnnnnnnnnnnnnnnnnnnnnnnnnnnnnnnnnnnnnnnnnnnnnnnnnnnnnnnnnnnnnnnnnnnnnnnnnnnnnnnnnnnnnnnnnnnnnnnnnnnnnnnnnnnnnnnnnnnnnnnnnnnnnnnnnnnnnnnnnnnnnnnnnnnnnnnnnnnnnnnnnnnnnnnnnnnnnnnnnnnnnnnnnnnnnnnnnnnnnnnnnnnnnnnnnnnnnnnnnnnnnnnnnnnnnnnnnnnnnnnnnnnnnnnnnnnnnnnnnnnnnnnnnnnnnnnnnnnnnnnnnnnnnnnnnnnnnnnnnnnnnnnnnnnnnnnnnnnnnnnnnnnnnnnnnnnnnnnnnnnnnnnnnnnnnnnnnnnnnnnnnnnnnnnnnnnnnnnnnnnnnnnnnnnnnnnnnnnnnnnnnnnnnnnnnnnnnnnnnnnnnnnnnnnnnnnnnnnnnnnnnnnnnnnnnnnnnnnnnnnnnnnnnnnnnnnnnnnnnnnnnnnnnnnnnnnnnnnnnnnnnnnnnnnnnnnnnnnnnnnnnnnnnnnnnnnnnnnnnnnnnnnnnnnnnnnnnnnnnnnnnnnnnnnnnnnnnnnnnnnnnnnnnnnnnnnnnnnnnnnnnnnnnnnnnnnnnnnnnnnnnnnnnnnnnnnnnnnnnnnnnnnnnnnnnnnnnnnnnnnnnnnnnnnnnnnnnnnnnnnnnnnnnnnnnnnnnnnnnnnnnnnnnnnnnnnnnnnnnnnnnnnnnnnnnnnnnnnnnnnnnnnnnnnnnnnnnnnnnnnnnnnnnnnnnnnnnnnnnnnnnnnnnnnnnnnnnnnnnnnnnnnnnnnnnnnnnnnnnnnnnnnnnnnnnnnnnnnnnnnnnnnnnnnnnnnnnnnnnnnnnnnnnnnnnnnnnnnnnnnnnnnnnnnnnnnnnnnnnnnnnnnnnnnnnnnnnnnnnnnnnnnnnnnnnnnnnnnnnnnnnnnnnnnnnnnnnnnnnnnnnnnnnnnnnnnnnnnnnnnnnnnnnnnnnnnnnnnnnnnnnnnnnnnnnnnnnnnnnnnnnnnnnnnnnnnnnnnnnnnnnnnnnnnnnnnnnnnnnnnnnnnnnnnnnnnnnnnnnnnnnnnnnnnnnnnnnnnnnnnnnnnnnnnnnnnnnnnnnnnnnnnnnnnnnnnnnnnnnnnnnnnnnnnnnnnnnnnnnnnnnnnnnnnnnnnnnnnnnnnnnnnnnnnnnnnnnnnnnnnnnnnnnnnnnnnnnnnnnnnnnnnnnnnnnnnnnnnnnnnnnnnnnnnnnnnnnnnnnnnnnnnnnnnnnnnnnnnnnnnnnnnnnnnnnnnnnnnnnnnnnnnnnnnnnnnnnnnnnnnnnnnnnnnnnnnnnnnnnnnnnnnnnnnnnnnnnnnnnnnnnnnnnnnnnnnnnnnnnnnnnnnnnnnnnnnnnnnnnnnnnnnnnnnnnnnnnnnnnnnnnnnnnnnnnnnnnnnnnnnnnnnnnnnnnnnnnnnnnnnnnnnnnnnnnnnnnnnnnnnnnnnnnnnnnnnnnnnnnnnnnnnnnnnnnnnnnnnnnnnnnnnnnnnnnnnnnnnnnnnnnnnnnnnnnnnnnnnnnnnnnnnnnnnnnnnnnnnnnnnnnnnnnnnnnnnnnnnnnnnnnnnnnnnnnnnnnnnnnnnnnnnnnnnnnnnnnnnnnnnnnnnnnnnnnnnnnnnnnnnnnnnnnnnnnnnnnnnnnnnnnnnnnnnnnnnnnnnnnnnnnnnnnnnnnnnnnnnnnnnnnnnnnnnnnnnnnnnnnnnnnnnnnnnnnnnnnnnnnnnnnnnnnnnnnnnnnnnnnnnnnnnnnnnnnnnnnnnnnnnnnnnnnnnnnnnnnnnnnnnnnnnnnnnnnnnnnnnnnnnnnnnnnnnnnnnnnnnnnnnnnnnnnnnnnnnnnnnnnnnnnnnnnnnnnnnnnnnnnnnnnnnnnnnnnnnnnnnnnnnnnnnnnnnnnnnnnnnnnnnnnnnnnnnnnnnnnnnnnnnnnnnnnnnnnnnnnnnnnnnnnnnnnnnnnnnnnnnnnnnnnnnnnnnnnnnnnnnnnnnnnnnnnnnnnnnnnnnnnnnnnnnnnnnnnnnnnnnnnnnnnnnnnnnnnnnnnnnnnnnnnnnnnnnnnnnnnnnnnnnnnnnnnnnnnnnnnnnnnnnnnnnnnnnnnnnnnnnnnnnnnnnnnnnnnnnnnnnnnnnnnnnnnnnnnnnnnnnnnnnnnnnnnnnnnnnnnnnnnnnnnnnnnnnnnnnnnnnnnnnnnnnnnnnnnnnnnnnnnnnnnnnnnnnnnnnnnnnnnnnnnnnnnnnnnnnnnnnnnnnnnnnnnnnnnnnnnnnnnnnnnnnnnnnnnnnnnnnnnnnnnnnnnnnnnnnnnnnnnnnnnnnnnnnnnnnnnnnnnnnnnnnnnnnnnnnnnnnnnnnnnnnnnnnnnnnnnnnnnnnnnnnnnnnnnnnnnnnnnnnnnnnnnnnnnnnnnnnnnnnnnnnnnnnnnnnnnnnnnnnnnnnnnnnnnnnnnnnnnnnnnnnnnnnnnnnnnnnnnnnnnnnnnnnnnnnnnnnnnnnnnnnnnnnnnnnnnnnnnnnnnnnnnnnnnnnnnnnnnnnnnnnnnnnnnnnnnnnnnnnnnnnnnnnnnnnnnnnnnnnnnnnnnnnnnnnnnnnnnnnnnnnnnnnnnnnnnnnnnnnnnnnnnnnnnnnnnnnnnnnnnnnnnnnnnnnnnnnnnnnnnnnnnnnnnnnnnnnnnnnnnnnnnnnnnnnnnnnnnnnnnnnnnnnnnnnnnnnnnnnnnnnnnnnnnnnnnnnnnnnnnnnnnnnnnnnnnnnnnnnnnnnnnnnnnnnnnnnnnnnnnnnnnnnnnnnnnnnnnnnnnnnnnnnnnnnnnnnnnnnnnnnnnnnnnnnnnnnnnnnnnnnnnnnnnnnnnnnnnnnnnnnnnnnnnnnnnnnnnnnnnnnnnnnnnnnnnnnnnnnnnnnnnnnnnnnnnnnnnnnnnnnnnnnnnnnnnnnnnnnnnnnnnnnnnnnnnnnnnnnnnnnnnnnnnnnnnnnnnnnnnnnnnnnnnnnnnnnnnnnnnnnnnnnnnnnnnnnnnnnnnnnnnnnnnnnnnnnnnnnnnnnnnnnnnnnnnnnnnnnnnnnnnnnnnnnnnnnnnnnnnnnnnnnnnnnnnnnnnnnnnnnnnnnnnnnnnnnnnnnnnnnnnnnnnnnnnnnnnnnnnnnnnnnnnnnnnnnnnnnnnnnnnnnnnnnnnnnnnnnnnnnnnnnnnnnnnnnnnnnnnnnnnnnnnnnnnnnnnnnnnnnnnnnnnnnnnnnnnnnnnnnnnnnnnnnnnnnnnnnnnnnnnnnnnnnnnnnnnnnnnnnnnnnnnnnnnnnnnnnnnnnnnnnnnnnnnnnnnnnnnnnnnnnnnnnnnnnnnnnnnnnnnnnnnnnnnnnnnnnnnnnnnnnnnnnnnnnnnnnnnnnnnnnnnnnnnnnnnnnnnnnnnnnnnnnnnnnnnnnnnnnnnnnnnnnnnnnnnnnnnnnnnnnnnnnnnnnnnnnnnnnnnnnnnnnnnnnnnnnnnnnnnnnnnnnnnnnnnnnnnnnnnnnnnnnnnnnnnnnnnnnnnnnnnnnnnnnnnnnnnnnnnnnnnnnnnnnnnnnnnnnnnnnnnnnnnnnnnnnnnnnnnnnnnnnnnnnnnnnnnnnnnnnnnnnnnnnnnnnnnnnnnnnnnnnnnnnnnnnnnnnnnnnnnnnnnnnnnnnnnnnnnnnnnnnnnnnnnnnnnnnnnnnnnnnnnnnnnnnnnnnnnnnnnnnnnnnnnnnnnnnnnnnnnnnnnnnnnnnnnnnnnnnnnnnnnnnnnnnnnnnnnnnnnnnnnnnnnnnnnnnnnnnnnnnnnnnnnnnnnnnnnnnnnnnnnnnnnnnnnnnnnnnnnnnnnnnnnnnnnnnnnnnnnnnnnnnnnnnnnnnnnnnnnnnnnnnnnnnnnnnnnnnnnnnnnnnnnnnnnnnnnnnnnnnnnnnnnnnnnnnnnnnnnnnnnnnnnnnnnnnnnnnnnnnnnnnnnnnnnnnnnnnnnnnnnnnnnnnnnnnnnnnnnnnnnnnnnnnnnnnnnnnnnnnnnnnnnnnnnnnnnnnnnnnnnnnnnnnnnnnnnnnnnnnnnnnnnnnnnnnnnnnnnnnnnnnnnnnnnnnnnnnnnnnnnnnnnnnnnnnnnnnnnnnnnnnnnnnnnnnnnnnnnnnnnnnnnnnnnnnnnnnnnnnnnnnnnnnnnnnnnnnnnnnnnnnnnnnnnnnnnnnnnnnnnnnnnnnnnnnnnnnnnnnnnnnnnnnnnnnnnnnnnnnnnnnnnnnnnnnnnnnnnnnnnnnnnnnnnnnnnnnnnnnnnnnnnnnnnnnnnnnnnnnnnnnnnnnnnnnnnnnnnnnnnnnnnnnnnnnnnnnnnnnnnnnnnnnnnnnnnnnnnnnnnnnnnnnnnnnnnnnnnnnnnnnnnnnnnnnnnnnnnnnnnnnnnnnnnnnnnnnnnnnnnnnnnnnnnnnnnnnnnnnnnnnnnnnnnnnnnnnnnnnnnnnnnnnnnnnnnnnnnnnnnnnnnnnnnnnnnnnnnnnnnnnnnnnnnnnnnnnnnnnnnnnnnnnnnnnnnnnnnnnnnnnnnnnnnnnnnnnnnnnnnnnnnnnnnnnnnnnnnnnnnnnnnnnnnnnnnnnnnnnnnnnnnnnnnnnnnnnnnnnnnnnnnnnnnnnnnnnnnnnnnnnnnnnnnnnnnnnnnnnnnnnnnnnnnnnnnnnnnnnnnnnnnnnnnnnnnnnnnnnnnnnnnnnnnnnnnnnnnnnnnnnnnnnnnnnnnnnnnnnnnnnnnnnnnnnnnnnnnnnnnnnnnnnnnnnnnnnnnnnnnnnnnnnnnnnnnnnnnnnnnnnnnnnnnnnnnnnnnnnnnnnnnnnnnnnnnnnnnnnnnnnnnnnnnnnnnnnnnnnnnnnnnnnnnnnnnnnnnnnnnnnnnnnnnnnnnnnnnnnnnnnnnnnnnnnnnnnnnnnnnnnnnnnnnnnnnnnnnnnnnnnnnnnnnnnnnnnnnnnnnnnnnnnnnnnnnnnnnnnnnnnnnnnnnnnnnnnnnnnnnnnnnnnnnnnnnnnnnnnnnnnnnnnnnnnnnnnnnnnnnnnnnnnnnnnnnnnnnnnnnnnnnnnnnnnnnnnnnnnnnnnnnnnnnnnnnnnnnnnnnnnnnnnnnnnnnnnnnnnnnnnnnnnnnnnnnnnnnnnnnnnnnnnnnnnnnnnnnnnnnnnnnnnnnnnnnnnnnnnnnnnnnnnnnnnnnnnnnnnnnnnnnnnnnnnnnnnnnnnnnnnnnnnnnnnnnnnnnnnnnnnnnnnnnnnnnnnnnnnnnnnnnnnnnnnnnnnnnnnnnnnnnnnnnnnnnnnnnnnnnnnnnnnnnnnnnnnnnnnnnnnnnnnnnnnnnnnnnnnnnnnnnnnnnnnnnnnnnnnnnnnnnnnnnnnnnnnnnnnnnnnnnnnnnnnnnnnnnnnnnnnnnnnnnnnnnnnnnnnnnnnnnnnnnnnnnnnnnnnnnnnnnnnnnnnnnnnnnnnnnnnnnnnnnnnnnnnnnnnnnnnnnnnnnnnnnnnnnnnnnnnnnnnnnnnnnnnnnnnnnnnnnnnnnnnnnnnnnnnnnnnnnnnnnnnnnnnnnnnnnnnnnnnnnnnnnnnnnnnnnnnnnnnnnnnnnnnnnnnnnnnnnnnnnnnnnnnnnnnnnnnnnnnnnnnnnnnnnnnnnnnnnnnnnnnnnnnnnnnnnnnnnnnnnnnnnnnnnnnnnnnnnnnnnnnnnnnnnnnnnnnnnnnnnnnnnnnnnnnnnnnnnnnnnnnnnnnnnnnnnnnnnnnnnnnnnnnnnnnnnnnnnnnnnnnnnnnnnnnnnnnnnnnnnnnnnnnnnnnnnnnnnnnnnnnnnnnnnnnnnnnnnnnnnnnnnnnnnnnnnnnnnnnnnnnnnnnnnnnnnnnnnnnnnnnnnnnnnnnnnnnnnnnnnnnnnnnnnnnnnnnnnnnnnnnnnnnnnnnnnnnnnnnnnnnnnnnnnnnnnnnnnnnnnnnnnnnnnnnnnnnnnnnnnnnnnnnnnnnnnnnnnnnnnnnnnnnnnnnnnnnnnnnnnnnnnnnnnnnnnnnnnnnnnnnnnnnnnnnnnnnnnnnnnnnnnnnnnnnnnnnnnnnnnnnnnnnnnnnnnnnnnnnnnnnnnnnnnnnnnnnnnnnnnnnnnnnnnnnnnnnnnnnnnnnnnnnnnnnnnnnnnnnnnnnnnnnnnnnnnnnnnnnnnnnnnnnnnnnnnnnnnnnnnnnnnnnnnnnnnnnnnnnnnnnnnnnnnnnnnnnnnnnnnnnnnnnnnnnnnnnnnnnnnnnnnnnnnnnnnnnnnnnnnnnnnnnnnnnnnnnnnnnnnnnnnnnnnnnnnnnnnnnnnnnnnnnnnnnnnnnnnnnnnnnnnnnnnnnnnnnnnnnnnnnnnnnnnnnnnnnnnnnnnnnnnnnnnnnnnnnnnnnnnnnnnnnnnnnnnnnnnnnnnnnnnnnnnnnnnnnnnnnnnnnnnnnnnnnnnnnnnnnnnnnnnnnnnnnnnnnnnnnnnnnnnnnnnnnnnnnnnnnnnnnnnnnnnnnnnnnnnnnnnnnnnnnnnnnnnnnnnnnnnnnnnnnnnnnnnnnnnnnnnnnnnnnnnnnnnnnnnnnnnnnnnnnnnnnnnnnnnnnnnnnnnnnnnnnnnnnnnnnnnnnnnnnnnnnnnnnnnnnnnnnnnnnnnnnnnnnnnnnnnnnnnnnnnnnnnnnnnnnnnnnnnnnnnnnnnnnnnnnnnnnnnnnnnnnnnnnnnnnnnnnnnnnnnnnnnnnnnnnnnnnnnnnnnnnnnnnnnnnnnnnnnnnnnnnnnnnnnnnnnnnnnnnnnnnnnnnnnnnnnnnnnnnnnnnnnnnnnnnnnnnnnnnnnnnnnnnnnnnnnnnnnnnnnnnnnnnnnnnnnnnnnnnnnnnnnnnnnnnnnnnnnnnnnnnnnnnnnnnnnnnnnnnnnnnnnnnnnnnnnnnnnnnnnnnnnnnnnnnnnnnnnnnnnnnnnnnnnnnnnnnnnnnnnnnnnnnnnnnnnnnnnnnnnnnnnnnnnnnnnnnnnnnnnnnnnnnnnnnnnnnnnnnnnnnnnnnnnnnnnnnnnnnnnnnnnnnnnnnnnnnnnnnnnnnnnnnnnnnnnnnnnnnnnnnnnnnnnnnnnnnnnnnnnnnnnnnnnnnnnnnnnnnnnnnnnnnnnnnnnnnnnnnnnnnnnnnnnnnnnnnnnnnnnnnnnnnnnnnnnnnnnnnnnnnnnnnnnnnnnnnnnnnnnnnnnnnnnnnnnnnnnnnnnnnnnnnnnnnnnnnnnnnnnnnnnnnnnnnnnnnnnnnnnnnnnnnnnnnnnnnnnnnnnnnnnnnnnnnnnnnnnnnnnnnnnnnnnnnnnnnnnnnnnnnnnnnnnnnnnnnnnnnnnnnnnnnnnnnnnnnnnnnnnnnnnnnnnnnnnnnnnnnnnnnnnnnnnnnnnnnnnnnnnnnnnnnnnnnnnnnnnnnnnnnnnnnnnnnnnnnnnnnnnnnnnnnnnnnnnnnnnnnnnnnnnnnnnnnnnnnnnnnnnnnnnnnnnnnnnnnnnnnnnnnnnnnnnnnnnnnnnnnnnnnnnnnnnnnnnnnnnnnnnnnnnnnnnnnnnnnnnnnnnnnnnnnnnnnnnnnnnnnnnnnnnnnnnnnnnnnnnnnnnnnnnnnnnnnnnnnnnnnnnnnnnnnnnnnnnnnnnnnnnnnnnnnnnnnnnnnnnnnnnnnnnnnnnnnnnnnnnnnnnnnnnnnnnnnnnnnnnnnnnnnnnnnnnnnnnnnnnnnnnnnnnnnnnnnnnnnnnnnnnnnnnnnnnnnnnnnnnnnnnnnnnnnnnnnnnnnnnnnnnnnnnnnnnnnnnnnnnnnnnnnnnnnnnnnnnnnnnnnnnnnnnnnnnnnnnnnnnnnnnnnnnnnnnnnnnnnnnnnnnnnnnnnnnnnnnnnnnnnnnnnnnnnnnnnnnnnnnnnnnnnnnnnnnnnnnnnnnnnnnnnnnnnnnnnnnnnnnnnnnnnnnnnnnnnnnnnnnnnnnnnnnnnnnnnnnnnnnnnnnnnnnnnnnnnnnnnnnnnnnnnnnnnnnnnnnnnnnnnnnnnnnnnnnnnnnnnnnnnnnnnnnnnnnnnnnnnnnnnnnnnnnnnnnnnnnnnnnnnnnnnnnnnnnnnnnnnnnnnnnnnnnnnnnnnnnnnnnnnnnnnnnnnnnnnnnnnnnnnnnnnnnnnnnnnnnnnnnnnnnnnnnnnnnnnnnnnnnnnnnnnnnnnnnnnnnnnnnnnnnnnnnnnnnnnnnnnnnnnnnnnnnnnnnnnnnnnnnnnnnnnnnnnnnnnnnnnnnnnnnnnnnnnnnnnnnnnnnnnnnnnnnnnnnnnnnnnnnnnnnnnnnnnnnnnnnnnnnnnnnnnnnnnnnnnnnnnnnnnnnnnnnnnnnnnnnnnnnnnnnnnnnnnnnnnnnnnnnnnnnnnnnnnnnnnnnnnnnnnnnnnnnnnnnnnnnnnnnnnnnnnnnnnnnnnnnnnnnnnnnnnnnnnnnnnnnnnnnnnnnnnnnnnnnnnnnnnnnnnnnnnnnnnnnnnnnnnnnnnnnnnnnnnnnnnnnnnnnnnnnnnnnnnnnnnnnnnnnnnnnnnnnnnnnnnnnnnnnnnnnnnnnnnnnnnnnnnnnnnnnnnnnnnnnnnnnnnnnnnnnnnnnnnnnnnnnnnnnnnnnnnnnnnnnnnnnnnnnnnnnnnnnnnnnnnnnnnnnnnnnnnnnnnnnnnnnnnnnnnnnnnnnnnnnnnnnnnnnnnnnnnnnnnnnnnnnnnnnnnnnnnnnnnnnnnnnnnnnnnnnnnnnnnnnnnnnnnnnnnnnnnnnnnnnnnnnnnnnnnnnnnnnnnnnnnnnnnnnnnnnnnnnnnnnnnnnnnnnnnnnnnnnnnnnnnnnnnnnnnnnnnnnnnnnnnnnnnnnnnnnnnnnnnnnnnnnnnnnnnnnnnnnnnnnnnnnnnnnnnnnnnnnnnnnnnnnnnnnnnnnnnnnnnnnnnnnnnnnnnnnnnnnnnnnnnnnnnnnnnnnnnnnnnnnnnnnnnnnnnnnnnnnnnnnnnnnnnnnnnnnnnnnnnnnnnnnnnnnnnnnnnnnnnnnnnnnnnnnnnnnnnnnnnnnnnnnnnnnnnnnnnnnnnnnnnnnnnnnnnnnnnnnnnnnnnnnnnnnnnnnnnnnnnnnnnnnnnnnnnnnnnnnnnnnnnnnnnnnnnnnnnnnnnnnnnnnnnnnnnnnnnnnnnnnnnnnnnnnnnnnnnnnnnnnnnnnnnnnnnnnnnnnnnnnnnnnnnnnnnnnnnnnnnnnnnnnnnnnnnnnnnnnnnnnnnnnnnnnnnnnnnnnnnnnnnnnnnnnnnnnnnnnnnnnnnnnnnnnnnnnnnnnnnnnnnnnnnnnnnnnnnnnnnnnnnnnnnnnnnnnnnnnnnnnnnnnnnnnnnnnnnnnnnnnnnnnnnnnnnnnnnnnnnnnnnnnnnnnnnnnnnnnnnnnnnnnnnnnnnnnnnnnnnnnnnnnnnnnnnnnnnnnnnnnnnnnnnnnnnnnnnnnnnnnnnnnnnnnnnnnnnnnnnnnnnnnnnnnnnnnnnnnnnnnnnnnnnnnnnnnnnnnnnnnnnnnnnnnnnnnnnnnnnnnnnnnnnnnnnnnnnnnnnnnnnnnnnnnnnnnnnnnnnnnnnnnnnnnnnnnnnnnnnnnnnnnnnnnnnnnnnnnnnnnnnnnnnnnnnnnnnnnnnnnnnnnnnnnnnnnnnnnnnnnnnnnnnnnnnnnnnnnnnnnnnnnnnnnnnnnnnnnnnnnnnnnnnnnnnnnnnnnnnnnnnnnnnnnnnnnnnnnnnnnnnnnnnnnnnnnnnnnnnnnnnnnnnnnnnnnnnnnnnnnnnnnnnnnnnnnnnnnnnnnnnnnnnnnnnnnnnnnnnnnnnnnnnnnnnnnnnnnnnnnnnnnnnnnnnnnnnnnnnnnnnnnnnnnnnnnnnnnnnnnnnnnnnnnnnnnnnnnnnnnnnnnnnnnnnnnnnnnnnnnnnnnnnnnnnnnnnnnnnnnnnnnnnnnnnnnnnnnnnnnnnnnnnnnnnnnnnnnnnnnnnnnnnnnnnnnnnnnnnnnnnnnnnnnnnnnnnnnnnnnnnnnnnnnnnnnnnnnnnnnnnnnnnnnnnnnnnnnnnnnnnnnnnnnnnnnnnnnnnnnnnnnnnnnnnnnnnnnnnnnnnnnnnnnnnnnnnnnnnnnnnnnnnnnnnnnnnnnnnnnnnnnnnnnnnnnnnnnnnnnnnnnnnnnnnnnnnnnnnnnnnnnnnnnnnnnnnnnnnnnnnnnnnnnnnnnnnnnnnnnnnnnnnnnnnnnnnnnnnnnnnnnnnnnnnnnnnnnnnnnnnnnnnnnnnnnnnnnnnnnnnnnnnnnnnnnnnnnnnnnnnnnnnnnnnnnnnnnnnnnnnnnnnnnnnnnnnnnnnnnnnnnnnnnnnnnnnnnnnnnnnnnnnnnnnnnnnnnnnnnnnnnnnnnnnnnnnnnnnnnnnnnnnnnnnnnnnnnnnnnnnnnnnnnnnnnnnnnnnnnnnnnnnnnnnnnnnnnnnnnnnnnnnnnnnnnnnnnnnnnnnnnnnnnnnnnnnnnnnnnnnnnnnnnnnnnnnnnnnnnnnnnnnnnnnnnnnnnnnnnnnnnnnnnnnnnnnnnnnnnnnnnnnnnnnnnnnnnnnnnnnnnnnnnnnnnnnnnnnnnnnnnnnnnnnnnnnnnnnnnnnnnnnnnnnnnnnnnnnnnnnnnnnnnnnnnnnnnnnnnnnnnnnnnnnnnnnnnnnnnnnnnnnnnnnnnnnnnnnnnnnnnnnnnnnnnnnnnnnnnnnnnnnnnnnnnnnnnnnnnnnnnnnnnnnnnnnnnnnnnnnnnnnnnnnnnnnnnnnnnnnnnnnnnnnnnnnnnnnnnnnnnnnnnnnnnnnnnnnnnnnnnnnnnnnnnnnnnnnnnnnnnnnnnnnnnnnnnnnnnnnnnnnnnnnnnnnnnnnnnnnnnnnnnnnnnnnnnnnnnnnnnnnnnnnnnnnnnnnnnnnnnnnnnnnnnnnnnnnnnnnnnnnnnnnnnnnnnnnnnnnnnnnnnnnnnnnnnnnnnnnnnnnnnnnnnnnnnnnnnnnnnnnnnnnnnnnnnnnnnnnnnnnnnnnnnnnnnnnnnnnnnnnnnnnnnnnnnnnnnnnnnnnnnnnnnnnnnnnnnnnnnnnnnnnnnnnnnnnnnnnnnnnnnnnnnnnnnnnnnnnnnnnnnnnnnnnnnnnnnnnnnnnnnnnnnnnnnnnnnnnnnnnnnnnnnnnnnnnnnnnnnnnnnnnnnnnnnnnnnnnnnnnnnnnnnnnnnnnnnnnnnnnnnnnnnnnnnnnnnnnnnnnnnnnnnnnnnnnnnnnnnnnnnnnnnnnnnnnnnnnnnnnnnnnnnnnnnnnnnnnnnnnnnnnnnnnnnnnnnnnnnnnnnnnnnnnnnnnnnnnnnnnnnnnnnnnnnnnnnnnnnnnnnnnnnnnnnnnnnnnnnnnnnnnnnnnnnnnnnnnnnnnnnnnnnnnnnnnnnnnnnnnnnnnnnnnnnnnnnnnnnnnnnnnnnnnnnnnnnnnnnnnnnnnnnnnnnnnnnnnnnnnnnnnnnnnnnnnnnnnnnnnnnnnnnnnnnnnnnnnnnnnnnnnnnnnnnnnnnnnnnnnnnnnnnnnnnnnnnnnnnnnnnnnnnnnnnnnnnnnnnnnnnnnnnnnnnnnnnnnnnnnnnnnnnnnnnnnnnnnnnnnnnnnnnnnnnnnnnnnnnnnnnnnnnnnnnnnnnnnnnnnnnnnnnnnnnnnnnnnnnnnnnnnnnnnnnnnnnnnnnnnnnnnnnnnnnnnnnnnnnnnnnnnnnnnnnnnnnnnnnnnnnnnnnnnnnnnnnnnnnnnnnnnnnnnnnnnnnnnnnnnnnnnnnnnnnnnnnnnnnnnnnnnnnnnnnnnnnnnnnnnnnnnnnnnnnnnnnnnnnnnnnnnnnnnnnnnnnnnnnnnnnnnnnnnnnnnnnnnnnnnnnnnnnnnnnnnnnnnnnnnnnnnnnnnnnnnnnnnnnnnnnnnnnnnnnnnnnnnnnnnnnnnnnnnnnnnnnnnnnnnnnnnnnnnnnnnnnnnnnnnnnnnnnnnnnnnnnnnnnnnnnnnnnnnnnnnnnnnnnnnnnnnnnnnnnnnnnnnnnnnnnnnnnnnnnnnnnnnnnnnnnnnnnnnnnnnnnnnnnnnnnnnnnnnnnnnnnnnnnnnnnnnnnnnnnnnnnnnnnnnnnnnnnnnnnnnnnnnnnnnnnnnnnnnnnnnnnnnnnnnnnnnnnnnnnnnnnnnnnnnnnnnnnnnnnnnnnnnnnnnnnnnnnnnnnnnnnnnnnnnnnnnnnnnnnnnnnnnnnnnnnnnnnnnnnnnnnnnnnnnnnnnnnnnnnnnnnnnnnnnnnnnnnnnnnnnnnnnnnnnnnnnnnnnnnnnnnnnnnnnnnnnnnnnnnnnnnnnnnnnnnnnnnnnnnnnnnnnnnnnnnnnnnnnnnnnnnnnnnnnnnnnnnnnnnnnnnnnnnnnnnnnnnnnnnnnnnnnnnnnnnnnnnnnnnnnnnnnnnnnnnnnnnnnnnnnnnnnnnnnnnnnnnnnnnnnnnnnnnnnnnnnnnnnnnnnnnnnnnnnnnnnnnnnnnnnnnnnnnnnnnnnnnnnnnnnnnnnnnnnnnnnnnnnnnnnnnnnnnnnnnnnnnnnnnnnnnnnnnnnnnnnnnnnnnnnnnnnnnnnnnnnnnnnnnnnnnnnnnnnnnnnnnnnnnnnnnnnnnnnnnnnnnnnnnnnnnnnnnnnnnnnnnnnnnnnnnnnnnnnnnnnnnnnnnnnnnnnnnnnnnnnnnnnnnnnnnnnnnnnnnnnnnnnnnnnnnnnnnnnnnnnnnnnnnnnnnnnnnnnnnnnnnnnnnnnnnnnnnnnnnnnnnnnnnnnnnnnnnnnnnnnnnnnnnnnnnnnnnnnnnnnnnnnnnnnnnnnnnnnnnnnnnnnnnnnnnnnnnnnnnnnnnnnnnnnnnnnnnnnnnnnnnnnnnnnnnnnnnnnnnnnnnnnnnnnnnnnnnnnnnnnnnnnnnnnnnnnnnnnnnnnnnnnnnnnnnnnnnnnnnnnnnnnnnnnnnnnnnnnnnnnnnnnnnnnnnnnnnnnnnnnnnnnnnnnnnnnnnnnnnnnnnnnnnnnnnnnnnnnnnnnnnnnnnnnnnnnnnnnnnnnnnnnnnnnnnnnnnnnnnnnnnnnnnnnnnnnnnnnnnnnnnnnnnnnnnnnnnnnnnnnnnnnnnnnnnnnnnnnnnnnnnnnnnnnnnnnnnnnnnnnnnnnnnnnnnnnnnnnnnnnnnnnnnnnnnnnnnnnnnnnnnnnnnnnnnnnnnnnnnnnnnnnnnnnnnnnnnnnnnnnnnnnnnnnnnnnnnnnnnnnnnnnnnnnnnnnnnnnnnnnnnnnnnnnnnnnnnnnnnnnnnnnnnnnnnnnnnnnnnnnnnnnnnnnnnnnnnnnnnnnnnnnnnnnnnnnnnnnnnnnnnnnnnnnnnnnnnnnnnnnnnnnnnnnnnnnnnnnnnnnnnnnnnnnnnnnnnnnnnnnnnnnnnnnnnnnnnnnnnnnnnnnnnnnnnnnnnnnnnnnnnnnnnnnnnnnnnnnnnnnnnnnnnnnnnnnnnnnnnnnnnnnnnnnnnnnnnnnnnnnnnnnnnnnnnnnnnnnnnnnnnnnnnnnnnnnnnnnnnnnnnnnnnnnnnnnnnnnnnnnnnnnnnnnnnnnnnnnnnnnnnnnnnnnnnnnnnnnnnnnnnnnnnnnnnnnnnnnnnnnnnnnnnnnnnnnnnnnnnnnnnnnnnnnnnnnnnnnnnnnnnnnnnnnnnnnnnnnnnnnnnnnnnnnnnnnnnnnnnnnnnnnnnnnnnnnnnnnnnnnnnnnnnnnnnnnnnnnnnnnnnnnnnnnnnnnnnnnnnnnnnnnnnnnnnnnnnnnnnnnnnnnnnnnnnnnnnnnnnnnnnnnnnnnnnnnnnnnnnnnnnnnnnnnnnnnnnnnnnnnnnnnnnnnnnnnnnnnnnnnnnnnnnnnnnnnnnnnnnnnnnnnnnnnnnnnnnnnnnnnnnnnnnnnnnnnnnnnnnnnnnnnnnnnnnnnnnnnnnnnnnnnnnnnnnnnnnnnnnnnnnnnnnnnnnnnnnnnnnnnnnnnnnnnnnnnnnnnnnnnnnnnnnnnnnnnnnnnnnnnnnnnnnnnnnnnnnnnnnnnnnnnnnnnnnnnnnnnnnnnnnnnnnnnnnnnnnnnnnnnnnnnnnnnnnnnnnnnnnnnnnnnnnnnnnnnnnnnnnnnnnnnnnnnnnnnnnnnnnnnnnnnnnnnnnnnnnnnnnnnnnnnnnnnnnnnnnnnnnnnnnnnnnnnnnnnnnnnnnnnnnnnnnnnnnnnnnnnnnnnnnnnnnnnnnnnnnnnnnnnnnnnnnnnnnnnnnnnnnnnnnnnnnnnnnnnnnnnnnnnnnnnnnnnnnnnnnnnnnnnnnnnnnnnnnnnnnnnnnnnnnnnnnnnnnnnnnnnnnnnnnnnnnnnnnnnnnnnnnnnnnnnnnnnnnnnnnnnnnnnnnnnnnnnnnnnnnnnnnnnnnnnnnnnnnnnnnnnnnnnnnnnnnnnnnnnnnnnnnnnnnnnnnnnnnnnnnnnnnnnnnnnnnnnnnnnnnnnnnnnnnnnnnnnnnnnnnnnnnnnnnnnnnnnnnnnnnnnnnnnnnnnnnnnnnnnnnnnnnnnnnnnnnnnnnnnnnnnnnnnnnnnnnnnnnnnnnnnnnnnnnnnnnnnnnnnnnnnnnnnnnnnnnnnnnnnnnnnnnnnnnnnnnnnnnnnnnnnnnnnnnnnnnnnnnnnnnnnnnnnnnnnnnnnnnnnnnnnnnnnnnnnnnnnnnnnnnnnnnnnnnnnnnnnnnnnnnnnnnnnnnnnnnnnnnnnnnnnnnnnnnnnnnnnnnnnnnnnnnnnnnnnnnnnnnnnnnnnnnnnnnnnnnnnnnnnnnnnnnnnnnnnnnnnnnnnnnnnnnnnnnnnnnnnnnnnnnnnnnnnnnnnnnnnnnnnnnnnnnnnnnnnnnnnnnnnnnnnnnnnnnnnnnnnnnnnnnnnnnnnnnnnnnnnnnnnnnnnnnnnnnnnnnnnnnnnnnnnnnnnnnnnnnnnnnnnnnnnnnnnnnnnnnnnnnnnnnnnnnnnnnnnnnnnnnnnnnnnnnnnnnnnnnnnnnnnnnnnnnnnnnnnnnnnnnnnnnnnnnnnnnnnnnnnnnnnnnnnnnnnnnnnnnnnnnnnnnnnnnnnnnnnnnnnnnnnnnnnnnnnnnnnnnnnnnnnnnnnnnnnnnnnnnnnnnnnnnnnnnnnnnnnnnnnnnnnnnnnnnnnnnnnnnnnnnnnnnnnnnnnnnnnnnnnnnnnnnnnnnnnnnnnnnnnnnnnnnnnnnnnnnnnnnnnnnnnnnnnnnnnnnnnnnnnnnnnnnnnnnnnnnnnnnnnnnnnnnnnnnnnnnnnnnnnnnnnnnnnnnnnnnnnnnnnnnnnnnnnnnnnnnnnnnnnnnnnnnnnnnnnnnnnnnnnnnnnnnnnnnnnnnnnnnnnnnnnnnnnnnnnnnnnnnnnnnnnnnnnnnnnnnnnnnnnnnnnnnnnnnnnnnnnnnnnnnnnnnnnnnnnnnnnnnnnnnnnnnnnnnnnnnnnnnnnnnnnnnnnnnnnnnnnnnnnnnnnnnnnnnnnnnnnnnnnnnnnnnnnnnnnnnnnnnnnnnnnnnnnnnnnnnnnnnnnnnnnnnnnnnnnnnnnnnnnnnnnnnnnnnnnnnnnnnnnnnnnnnnnnnnnnnnnnnnnnnnnnnnnnnnnnnnnnnnnnnnnnnnnnnnnnnnnnnnnnnnnnnnnnnnnnnnnnnnnnnnnnnnnnnnnnnnnnnnnnnnnnnnnnnnnnnnnnnnnnnnnnnnnnnnnnnnnnnnnnnnnnnnnnnnnnnnnnnnnnnnnnnnnnnnnnnnnnnnnnnnnnnnnnnnnnnnnnnnnnnnnnnnnnnnnnnnnnnnnnnnnnnnnnnnnnnnnnnnnnnnnnnnnnnnnnnnnnnnnnnnnnnnnnnnnnnnnnnnnnnnnnnnnnnnnnnnnnnnnnnnnnnnnnnnnnnnnnnnnnnnnnnnnnnnnnnnnnnnnnnnnnnnnnnnnnnnnnnnnnnnnnnnnnnnnnnnnnnnnnnnnnnnnnnnnnnnnnnnnnnnnnnnnnnnnnnnnnnnnnnnnnnnnnnnnnnnnnnnnnnnnnnnnnnnnnnnnnnnnnnnnnnnnnnnnnnnnnnnnnnnnnnnnnnnnnnnnnnnnnnnnnnnnnnnnnnnnnnnnnnnnnnnnnnnnnnnnnnnnnnnnnnnnnnnnnnnnnnnnnnnnnnnnnnnnnnnnnnnnnnnnnnnnnnnnnnnnnnnnnnnnnnnnnnnnnnnnnnnnnnnnnnnnnnnnnnnnnnnnnnnnnnnnnnnnnnnnnnnnnnnnnnnnnnnnnnnnnnnnnnnnnnnnnnnnnnnnnnnnnnnnnnnnnnnnnnnnnnnnnnnnnnnnnnnnnnnnnnnnnnnnnnnnnnnnnnnnnnnnnnnnnnnnnnnnnnnnnnnnnnnnnnnnnnnnnnnnnnnnnnnnnnnnnnnnnnnnnnnnnnnnnnnnnnnnnnnnnnnnnnnnnnnnnnnnnnnnnnnnnnnnnnnnnnnnnnnnnnnnnnnnnnnnnnnnnnnnnnnnnnnnnnnnnnnnnnnnnnnnnnnnnnnnnnnnnnnnnnnnnnnnnnnnnnnnnnnnnnnnnnnnnnnnnnnnnnnnnnnnnnnnnnnnnnnnnnnnnnnnnnnnnnnnnnnnnnnnnnnnnnnnnnnnnnnnnnnnnnnnnnnnnnnnnnnnnnnnnnnnnnnnnnnnnnnnnnnnnnnnnnnnnnnnnnnnnnnnnnnnnnnnnnnnnnnnnnnnnnnnnnnnnnnnnnnnnnnnnnnnnnnnnnnnnnnnnnnnnnnnnnnnnnnnnnnnnnnnnnnnnnnnnnnnnnnnnnnnnnnnnnnnnnnnnnnnnnnnnnnnnnnnnnnnnnnnnnnnnnnnnnnnnnnnnnnnnnnnnnnnnnnnnnnnnnnnnnnnnnnnnnnnnnnnnnnnnnnnnnnnnnnnnnnnnnnnnnnnnnnnnnnnnnnnnnnnnnnnnnnnnnnnnnnnnnnnnnnnnnnnnnnnnnnnnnnnnnnnnnnnnnnnnnnnnnnnnnnnnnnnnnnnnnnnnnnnnnnnnnnnnnnnnnnnnnnnnnnnnnnnnnnnnnnnnnnnnnnnnnnnnnnnnnnnnnnnnnnnnnnnnnnnnnnnnnnnnnnnnnnnnnnnnnnnnnnnnnnnnnnnnnnnnnnnnnnnnnnnnnnnnnnnnnnnnnnnnnnnnnnnnnnnnnnnnnnnnnnnnnnnnnnnnnnnnnnnnnnnnnnnnnnnnnnnnnnnnnnnnnnnnnnnnnnnnnnnnnnnnnnnnnnnnnnnnnnnnnnnnnnnnnnnnnnnnnnnnnnnnnnnnnnnnnnnnnnnnnnnnnnnnnnnnnnnnnnnnnnnnnnnnnnnnnnnnnnnnnnnnnnnnnnnnnnnnnnnnnnnnnnnnnnnnnnnnnnnnnnnnnnnnnnnnnnnnnnnnnnnnnnnnnnnnnnnnnnnnnnnnnnnnnnnnnnnnnnnnnnnnnnnnnnnnnnnnnnnnnnnnnnnnnnnnnnnnnnnnnnnnnnnnnnnnnnnnnnnnnnnnnnnnnnnnnnnnnnnnnnnnnnnnnnnnnnnnnnnnnnnnnnnnnnnnnnnnnnnnnnnnnnnnnnnnnnnnnnnnnnnnnnnnnnnnnnnnnnnnnnnnnnnnnnnnnnnnnnnnnnnnnnnnnnnnnnnnnnnnnnnnnnnnnnnnnnnnnnnnnnnnnnnnnnnnnnnnnnnnnnnnnnnnnnnnnnnnnnnnnnnnnnnnnnnnnnnnnnnnnnnnnnnnnnnnnnnnnnnnnnnnnnnnnnnnnnnnnnnnnnnnnnnnnnnnnnnnnnnnnnnnnnnnnnnnnnnnnnnnnnnnnnnnnnnnnnnnnnnnnnnnnnnnnnnnnnnnnnnnnnnnnnnnnnnnnnnnnnnnnnnnnnnnnnnnnnnnnnnnnnnnnnnnnnnnnnnnnnnnnnnnnnnnnnnnnnnnnnnnnnnnnnnnnnnnnnnnnnnnnnnnnnnnnnnnnnnnnnnnnnnnnnnnnnnnnnnnnnnnnnnnnnnnnnnnnnnnnnnnnnnnnnnnnnnnnnnnnnnnnnnnnnnnnnnnnnnnnnnnnnnnnnnnnnnnnnnnnnnnnnnnnnnnnnnnnnnnnnnnnnnnnnnnnnnnnnnnnnnnnnnnnnnnnnnnnnnnnnnnnnnnnnnnnnnnnnnnnnnnnnnnnnnnnnnnnnnnnnnnnnnnnnnnnnnnnnnnnnnnnnnnnnnnnnnnnnnnnnnnnnnnnnnnnnnnnnnnnnnnnnnnnnnnnnnnnnnnnnnnnnnnnnnnnnnnnnnnnnnnnnnnnnnnnnnnnnnnnnnnnnnnnnnnnnnnnnnnnnnnnnnnnnnnnnnnnnnnnnnnnnnnnnnnnnnnnnnnnnnnnnnnnnnnnnnnnnnnnnnnnnnnnnnnnnnnnnnnnnnnnnnnnnnnnnnnnnnnnnnnnnnnnnnnnnnnnnnnnnnnnnnnnnnnnnnnnnnnnnnnnnnnnnnnnnnnnnnnnnnnnnnnnnnnnnnnnnnnnnnnnnnnnnnnnnnnnnnnnnnnnnnnnnnnnnnnnnnnnnnnnnnnnnnnnnnnnnnnnnnnnnnnnnnnnnnnnnnnnnnnnnnnnnnnnnnnnnnnnnnnnnnnnnnnnnnnnnnnnnnnnnnnnnnnnnnnnnnnnnnnnnnnnnnnnnnnnnnnnnnnnnnnnnnnnnnnnnnnnnnnnnnnnnnnnnnnnnnnnnnnnnnnnnnnnnnnnnnnnnnnnnnnnnnnnnnnnnnnnnnnnnnnnnnnnnnnnnnnnnnnnnnnnnnnnnnnnnnnnnnnnnnnnnnnnnnnnnnnnnnnnnnnnnnnnnnnnnnnnnnnnnnnnnnnnnnnnnnnnnnnnnnnnnnnnnnnnnnnnnnnnnnnnnnnnnnnnnnnnnnnnnnnnnnnnnnnnnnnnnnnnnnnnnnnnnnnnnnnnnnnnnnnnnnnnnnnnnnnnnnnnnnnnnnnnnnnnnnnnnnnnnnnnnnnnnnnnnnnnnnnnnnnnnnnnnnnnnnnnnnnnnnnnnnnnnnnnnnnnnnnnnnnnnnnnnnnnnnnnnnnnnnnnnnnnnnnnnnnnnnnnnnnnnnnnnnnnnnnnnnnnnnnnnnnnnnnnnnnnnnnnnnnnnnnnnnnnnnnnnnnnnnnnnnnnnnnnnnnnnnnnnnnnnnnnnnnnnnnnnnnnnnnnnnnnnnnnnnnnnnnnnnnnnnnnnnnnnnnnnnnnnnnnnnnnnnnnnnnnnnnnnnnnnnnnnnnnnnnnnnnnnnnnnnnnnnnnnnnnnnnnnnnnnnnnnnnnnnnnnnnnnnnnnnnnnnnnnnnnnnnnnnnnnnnnnnnnnnnnnnnnnnnnnnnnnnnnnnnnnnnnnnnnnnnnnnnnnnnnnnnnnnnnnnnnnnnnnnnnnnnnnnnnnnnnnnnnnnnnnnnnnnnnnnnnnnnnnnnnnnnnnnnnnnnnnnnnnnnnnnnnnnnnnnnnnnnnnnnnnnnnnnnnnnnnnnnnnnnnnnnnnnnnnnnnnnnnnnnnnnnnnnnnnnnnnnnnnnnnnnnnnnnnnnnnnnnnnnnnnnnnnnnnnnnnnnnnnnnnnnnnnnnnnnnnnnnnnnnnnnnnnnnnnnnnnnnnnnnnnnnnnnnnnnnnnnnnnnnnnnnnnnnnnnnnnnnnnnnnnnnnnnnnnnnnnnnnnnnnnnnnnnnnnnnnnnnnnnnnnnnnnnnnnnnnnnnnnnnnnnnnnnnnnnnnnnnnnnnnnnnnnnnnnnnnnnnnnnnnnnnnnnnnnnnnnnnnnnnnnnnnnnnnnnnnnnnnnnnnnnnnnnnnnnnnnnnnnnnnnnnnnnnnnnnnnnnnnnnnnnnnnnnnnnnnnnnnnnnnnnnnnnnnnnnnnnnnnnnnnnnnnnnnnnnnnnnnnnnnnnnnnnnnnnnnnnnnnnnnnnnnnnnnnnnnnnnnnnnnnnnnnnnnnnnnnnnnnnnnnnnnnnnnnnnnnnnnnnnnnnnnnnnnnnnnnnnnnnnnnnnnnnnnnnnnnnnnnnnnnnnnnnnnnnnnnnnnnnnnnnnnnnnnnnnnnnnnnnnnnnnnnnnnnnnnnnnnnnnnnnnnnnnnnnnnnnnnnnnnnnnnnnnnnnnnnnnnnnnnnnnnnnnnnnnnnnnnnnnnnnnnnnnnnnnnnnnnnnnnnnnnnnnnnnnnnnnnnnnnnnnnnnnnnnnnnnnnnnnnnnnnnnnnnnnnnnnnnnnnnnnnnnnnnnnnnnnnnnnnnnnnnnnnnnnnnnnnnnnnnnnnnnnnnnnnnnnnnnnnnnnnnnnnnnnnnnnnnnnnnnnnnnnnnnnnnnnnnnnnnnnnnnnnnnnnnnnnnnnnnnnnnnnnnnnnnnnnnnnnnnnnnnnnnnnnnnnnnnnnnnnnnnnnnnnnnnnnnnnnnnnnnnnnnnnnnnnnnnnnnnnnnnnnnnnnnnnnnnnnnnnnnnnnnnnnnnnnnnnnnnnnnnnnnnnnnnnnnnnnnnnnnnnnnnnnnnnnnnnnnnnnnnnnnnnnnnnnnnnnnnnnnnnnnnnnnnnnnnnnnnnnnnnnnnnnnnnnnnnnnnnnnnnnnnnnnnnnnnnnnnnnnnnnnnnnnnnnnnnnnnnnnnnnnnnnnnnnnnnnnnnnnnnnnnnnnnnnnnnnnnnnnnnnnnnnnnnnnnnnnnnnnnnnnnnnnnnnnnnnnnnnnnnnnnnnnnnnnnnnnnnnnnnnnnnnnnnnnnnnnnnnnnnnnnnnnnnnnnnnnnnnnnnnnnnnnnnnnnnnnnnnnnnnnnnnnnnnnnnnnnnnnnnnnnnnnnnnnnnnnnnnnnnnnnnnnnnnnnnnnnnnnnnnnnnnnnnnnnnnnnnnnnnnnnnnnnnnnnnnnnnnnnnnnnnnnnnnnnnnnnnnnnnnnnnnnnnnnnnnnnnnnnnnnnnnnnnnnnnnnnnnnnnnnnnnnnnnnnnnnnnnnnnnnnnnnnnnnnnnnnnnnnnnnnnnnnnnnnnnnnnnnnnnnnnnnnnnnnnnnnnnnnnnnnnnnnnnnnnnnnnnnnnnnnnnnnnnnnnnnnnnnnnnnnnnnnnnnnnnnnnnnnnnnnnnnnnnnnnnnnnnnnnnnnnnnnnnnnnnnnnnnnnnnnnnnnnnnnnnnnnnnnnnnnnnnnnnnnnnnnnnnnnnnnnnnnnnnnnnnnnnnnnnnnnnnnnnnnnnnnnnnnnnnnnnnnnnnnnnnnnnnnnnnnnnnnnnnnnnnnnnnnnnnnnnnnnnnnnnnnnnnnnnnnnnnnnnnnnnnnnnnnnnnnnnnnnnnnnnnnnnnnnnnnnnnnnnnnnnnnnnnnnnnnnnnnnnnnnnnnnnnnnnnnnnnnnnnnnnnnnnnnnnnnnnnnnnnnnnnnnnnnnnnnnnnnnnnnnnnnnnnnnnnnnnnnnnnnnnnnnnnnnnnnnnnnnnnnnnnnnnnnnnnnnnnnnnnnnnnnnnnnnnnnnnnnnnnnnnnnnnnnnnnnnnnnnnnnnnnnnnnnnnnnnnnnnnnnnnnnnnnnnnnnnnnnnnnnnnnnnnnnnnnnnnnnnnnnnnnnnnnnnnnnnnnnnnnnnnnnnnnnnnnnnnnnnnnnnnnnnnnnnnnnnnnnnnnnnnnnnnnnnnnnnnnnnnnnnnnnnnnnnnnnnnnnnnnnnnnnnnnnnnnnnnnnnnnnnnnnnnnnnnnnnnnnnnnnnnnnnnnnnnnnnnnnnnnnnnnnnnnnnnnnnnnnnnnnnnnnnnnnnnnnnnnnnnnnnnnnnnnnnnnnnnnnnnnnnnnnnnnnnnnnnnnnnnnnnnnnnnnnnnnnnnnnnnnnnnnnnnnnnnnnnnnnnnnnnnnnnnnnnnnnnnnnnnnnnnnnnnnnnnnnnnnnnnnnnnnnnnnnnnnnnnnnnnnnnnnnnnnnnnnnnnnnnnnnnnnnnnnnnnnnnnnnnnnnnnnnnnnnnnnnnnnnnnnnnnnnnnnnnnnnnnnnnnnnnnnnnnnnnnnnnnnnnnnnnnnnnnnnnnnnnnnnnnnnnnnnnnnnnnnnnnnnnnnnnnnnnnnnnnnnnnnnnnnnnnnnnnnnnnnnnnnnnnnnnnnnnnnnnnnnnnnnnnnnnnnnnnnnnnnnnnnnnnnnnnnnnnnnnnnnnnnnnnnnnnnnnnnnnnnnnnnnnnnnnnnnnnnnnnnnnnnnnnnnnnnnnnnnnnnnnnnnnnnnnnnnnnnnnnnnnnnnnnnnnnnnnnnnnnnnnnnnnnnnnnnnnnnnnnnnnnnnnnnnnnnnnnnnnnnnnnnnnnnnnnnnnnnnnnnnnnnnnnnnnnnnnnnnnnnnnnnnnnnnnnnnnnnnnnnnnnnnnnnnnnnnnnnnnnnnnnnnnnnnnnnnnnnnnnnnnnnnnnnnnnnnnnnnnnnnnnnnnnnnnnnnnnnnnnnnnnnnnnnnnnnnnnnnnnnnnnnnnnnnnnnnnnnnnnnnnnnnnnnnnnnnnnnnnnnnnnnnnnnnnnnnnnnnnnnnnnnnnnnnnnnnnnnnnnnnnnnnnnnnnnnnnnnnnnnnnnnnnnnnnnnnnnnnnnnnnnnnnnnnnnnnnnnnnnnnnnnnnnnnnnnnnnnnnnnnnnnnnnnnnnnnnnnnnnnnnnnnnnnnnnnnnnnnnnnnnnnnnnnnnnnnnnnnnnnnnnnnnnnnnnnnnnnnnnnnnnnnnnnnnnnnnnnnnnnnnnnnnnnnnnnnnnnnnnnnnnnnnnnnnnnnnnnnnnnnnnnnnnnnnnnnnnnnnnnnnnnnnnnnnnnnnnnnnnnnnnnnnnnnnnnnnnnnnnnnnnnnnnnnnnnnnnnnnnnnnnnnnnnnnnnnnnnnnnnnnnnnnnnnnnnnnnnnnnnnnnnnnnnnnnnnnnnnnnnnnnnnnnnnnnnnnnnnnnnnnnnnnnnnnnnnnnnnnnnnnnnnnnnnnnnnnnnnnnnnnnnnnnnnnnnnnnnnnnnnnnnnnnnnnnnnnnnnnnnnnnnnnnnnnnnnnnnnnnnnnnnnnnnnnnnnnnnnnnnnnnnnnnnnnnnnnnnnnnnnnnnnnnnnnnnnnnnnnnnnnnnnnnnnnnnnnnnnnnnnnnnnnnnnnnnnnnnnnnnnnnnnnnnnnnnnnnnnnnnnnnnnnnnnnnnnnnnnnnnnnnnnnnnnnnnnnnnnnnnnnnnnnnnnnnnnnnnnnnnnnnnnnnnnnnnnnnnnnnnnnnnnnnnnnnnnnnnnnnnnnnnnnnnnnnnnnnnnnnnnnnnnnnnnnnnnnnnnnnnnnnnnnnnnnnnnnnnnnnnnnnnnnnnnnnnnnnnnnnnnnnnnnnnnnnnnnnnnnnnnnnnnnnnnnnnnnnnnnnnnnnnnnnnnnnnnnnnnnnnnnnnnnnnnnnnnnnnnnnnnnnnnnnnnnnnnnnnnnnnnnnnnnnnnnnnnnnnnnnnnnnnnnnnnnnnnnnnnnnnnnnnnnnnnnnnnnnnnnnnnnnnnnnnnnnnnnnnnnnnnnnnnnnnnnnnnnnnnnnnnnnnnnnnnnnnnnnnnnnnnnnnnnnnnnnnnnnnnnnnnnnnnnnnnnnnnnnnnnnnnnnnnnnnnnnnnnnnnnnnnnnnnnnnnnnnnnnnnnnnnnnnnnnnnnnnnnnnnnnnnnnnnnnnnnnnnnnnnnnnnnnnnnnnnnnnnnnnnnnnnnnnnnnnnnnnnnnnnnnnnnnnnnnnnnnnnnnnnnnnnnnnnnnnnnnnnnnnnnnnnnnnnnnnnnnnnnnnnnnnnnnnnnnnnnnnnnnnnnnnnnnnnnnnnnnnnnnnnnnnnnnnnnnnnnnnnnnnnnnnnnnnnnnnnnnnnnnnnnnnnnnnnnnnnnnnnnnnnnnnnnnnnnnnnnnnnnnnnnnnnnnnnnnnnnnnnnnnnnnnnnnnnnnnnnnnnnnnnnnnnnnnnnnnnnnnnnnnnnnnnnnnnnnnnnnnnnnnnnnnnnnnnnnnnnnnnnnnnnnnnnnnnnnnnnnnnnnnnnnnnnnnnnnnnnnnnnnnnnnnnnnnnnnnnnnnnnnnnnnnnnnnnnnnnnnnnnnnnnnnnnnnnnnnnnnnnnnnnnnnnnnnnnnnnnnnnnnnnnnnnnnnnnnnnnnnnnnnnnnnnnnnnnnnnnnnnnnnnnnnnnnnnnnnnnnnnnnnnnnnnnnnnnnnnnnnnnnnnnnnnnnnnnnnnnnnnnnnnnnnnnnnnnnnnnnnnnnnnnnnnnnnnnnnnnnnnnnnnnnnnnnnnnnnnnnnnnnnnnnnnnnnnnnnnnnnnnnnnnnnnnnnnnnnnnnnnnnnnnnnnnnnnnnnnnnnnnnnnnnnnnnnnnnnnnnnnnnnnnnnnnnnnnnnnnnnnnnnnnnnnnnnnnnnnnnnnnnnnnnnnnnnnnnnnnnnnnnnnnnnnnnnnnnnnnnnnnnnnnnnnnnnnnnnnnnnnnnnnnnnnnnnnnnnnnnnnnnnnnnnnnnnnnnnnnnnnnnnnnnnnnnnnnnnnnnnnnnnnnnnnnnnnnnnnnnnnnnnnnnnnnnnnnnnnnnnnnnnnnnnnnnnnnnnnnnnnnnnnnnnnnnnnnnnnnnnnnnnnnnnnnnnnnnnnnnnnnnnnnnnnnnnnnnnnnnnnnnnnnnnnnnnnnnnnnnnnnnnnnnnnnnnnnnnnnnnnnnnnnnnnnnnnnnnnnnnnnnnnnnnnnnnnnnnnnnnnnnnnnnnnnnnnnnnnnnnnnnnnnnnnnnnnnnnnnnnnnnnnnnnnnnnnnnnnnnnnnnnnnnnnnnnnnnnnnnnnnnnnnnnnnnnnnnnnnnnnnnnnnnnnnnnnnnnnnnnnnnnnnnnnnnnnnnnnnnnnnnnnnnnnnnnnnnnnnnnnnnnnnnnnnnnnnnnnnnnnnnnnnnnnnnnnnnnnnnnnnnnnnnnnnnnnnnnnnnnnnnnnnnnnnnnnnnnnnnnnnnnnnnnnnnnnnnnnnnnnnnnnnnnnnnnnnnnnnnnnnnnnnnnnnnnnnnnnnnnnnnnnnnnnnnnnnnnnnnnnnnnnnnnnnnnnnnnnnnnnnnnnnnnnnnnnnnnnnnnnnnnnnnnnnnnnnnnnnnnnnnnnnnnnnnnnnnnnnnnnnnnnnnnnnnnnnnnnnnnnnnnnnnnnnnnnnnnnnnnnnnnnnnnnnnnnnnnnnnnnnnnnnnnnnnnnnnnnnnnnnnnnnnnnnnnnnnnnnnnnnnnnnnnnnnnnnnnnnnnnnnnnnnnnnnnnnnnnnnnnnnnnnnnnnnnnnnnnnnnnnnnnnnnnnnnnnnnnnnnnnnnnnnnnnnnnnnnnnnnnnnnnnnnnnnnnnnnnnnnnnnnnnnnnnnnnnnnnnnnnnnnnnnnnnnnnnnnnnnnnnnnnnnnnnnnnnnnnnnnnnnnnnnnnnnnnnnnnnnnnnnnnnnnnnnnnnnnnnnnnnnnnnnnnnnnnnnnnnnnnnnnnnnnnnnnnnnnnnnnnnnnnnnnnnnnnnnnnnnnnnnnnnnnnnnnnnnnnnnnnnnnnnnnnnnnnnnnnnnnnnnnnnnnnnnnnnnnnnnnnnnnnnnnnnnnnnnnnnnnnnnnnnnnnnnnnnnnnnnnnnnnnnnnnnnnnnnnnnnnnnnnnnnnnnnnnnnnnnnnnnnnnnnnnnnnnnnnnnnnnnnnnnnnnnnnnnnnnnnnnnnnnnnnnnnnnnnnnnnnnnnnnnnnnnnnnnnnnnnnnnnnnnnnnnnnnnnnnnnnnnnnnnnnnnnnnnnnnnnnnnnnnnnnnnnnnnnnnnnnnnnnnnnnnnnnnnnnnnnnnnnnnnnnnnnnnnnnnnnnnnnnnnnnnnnnnnnnnnnnnnnnnnnnnnnnnnnnnnnnnnnnnnnnnnnnnnnnnnnnnnnnnnnnnnnnnnnnnnnnnnnnnnnnnnnnnnnnnnnnnnnnnnnnnnnnnnnnnnnnnnnnnnnnnnnnnnnnnnnnnnnnnnnnnnnnnnnnnnnnnnnnnnnnnnnnnnnnnnnnnnnnnnnnnnnnnnnnnnnnnnnnnnnnnnnnnnnnnnnnnnnnnnnnnnnnnnnnnnnnnnnnnnnnnnnnnnnnnnnnnnnnnnnnnnnnnnnnnnnnnnnnnnnnnnnnnnnnnnnnnnnnnnnnnnnnnnnnnnnnnnnnnnnnnnnnnnnnnnnnnnnnnnnnnnnnnnnnnnnnnnnnnnnnnnnnnnnnnnnnnnnnnnnnnnnnnnnnnnnnnnnnnnnnnnnnnnnnnnnnnnnnnnnnnnnnnnnnnnnnnnnnnnnnnnnnnnnnnnnnnnnnnnnnnnnnnnnnnnnnnnnnnnnnnnnnnnnnnnnnnnnnnnnnnnnnnnnnnnnnnnnnnnnnnnnnnnnnnnnnnnnnnnnnnnnnnnnnnnnnnnnnnnnnnnnnnnnnnnnnnnnnnnnnnnnnnnnnnnnnnnnnnnnnnnnnnnnnnnnnnnnnnnnnnnnnnnnnnnnnnnnnnnnnnnnnnnnnnnnnnnnnnnnnnnnnnnnnnnnnnnnnnnnnnnnnnnnnnnnnnnnnnnnnnnnnnnnnnnnnnnnnnnnnnnnnnnnnnnnnnnnnnnnnnnnnnnnnnnnnnnnnnnnnnnnnnnnnnnnnnnnnnnnnnnnnnnnnnnnnnnnnnnnnnnnnnnnnnnnnnnnnnnnnnnnnnnnnnnnnnnnnnnnnnnnnnnnnnnnnnnnnnnnnnnnnnnnnnnnnnnnnnnnnnnnnnnnnnnnnnnnnnnnnnnnnnnnnnnnnnnnnnnnnnnnnnnnnnnnnnnnnnnnnnnnnnnnnnnnnnnnnnnnnnnnnnnnnnnnnnnnnnnnnnnnnnnnnnnnnnnnnnnnnnnnnnnnnnnnnnnnnnnnnnnnnnnnnnnnnnnnnnnnnnnnnnnnnnnnnnnnnnnnnnnnnnnnnnnnnnnnnnnnnnnnnnnnnnnnnnnnnnnnnnnnnnnnnnnnnnnnnnnnnnnnnnnnnnnnnnnnnnnnnnnnnnnnnnnnnnnnnnnnnnnnnnnnnnnnnnnnnnnnnnnnnnnnnnnnnnnnnnnnnnnnnnnnnnnnnnnnnnnnnnnnnnnnnnnnnnnnnnnnnnnnnnnnnnnnnnnnnnnnnnnnnnnnnnnnnnnnnnnnnnnnnnnnnnnnnnnnnnnnnnnnnnnnnnnnnnnnnnnnnnnnnnnnnnnnnnnnnnnnnnnnnnnnnnnnnnnnnnnnnnnnnnnnnnnnnnnnnnnnnnnnnnnnnnnnnnnnnnnnnnnnnnnnnnnnnnnnnnnnnnnnnnnnnnnnnnnnnnnnnnnnnnnnnnnnnnnnnnnnnnnnnnnnnnnnnnnnnnnnnnnnnnnnnnnnnnnnnnnnnnnnnnnnnnnnnnnnnnnnnnnnnnnnnnnnnnnnnnnnnnnnnnnnnnnnnnnnnnnnnnnnnnnnnnnnnnnnnnnnnnnnnnnnnnnnnnnnnnnnnnnnnnnnnnnnnnnnnnnnnnnnnnnnnnnnnnnnnnnnnnnnnnnnnnnnnnnnnnnnnnnnnnnnnnnnnnnnnnnnnnnnnnnnnnnnnnnnnnnnnnnnnnnnnnnnnnnnnnnnnnnnnnnnnnnnnnnnnnnnnnnnnnnnnnnnnnnnnnnnnnnnnnnnnnnnnnnnnnnnnnnnnnnnnnnnnnnnnnnnnnnnnnnnnnnnnnnnnnnnnnnnnnnnnnnnnnnnnnnnnnnnnnnnnnnnnnnnnnnnnnnnnnnnnnnnnnnnnnnnnnnnnnnnnnnnnnnnnnnnnnnnnnnnnnnnnnnnnnnnnnnnnnnnnnnnnnnnnnnnnnnnnnnnnnnnnnnnnnnnnnnnnnnnnnnnnnnnnnnnnnnnnnnnnnnnnnnnnnnnnnnnnnnnnnnnnnnnnnnnnnnnnnnnnnnnnnnnnnnnnnnnnnnnnnnnnnnnnnnnnnnnnnnnnnnnnnnnnnnnnnnnnnnnnnnnnnnnnnnnnnnnnnnnnnnnnnnnnnnnnnnnnnnnnnnnnnnnnnnnnnnnnnnnnnnnnnnnnnnnnnnnnnnnnnnnnnnnnnnnnnnnnnnnnnnnnnnnnnnnnnnnnnnnnnnnnnnnnnnnnnnnnnnnnnnnnnnnnnnnnnnnnnnnnnnnnnnnnnnnnnnnnnnnnnnnnnnnnnnnnnnnnnnnnnnnnnnnnnnnnnnnnnnnnnnnnnnnnnnnnnnnnnnnnnnnnnnnnnnnnnnnnnnnnnnnnnnnnnnnnnnnnnnnnnnnnnnnnnnnnnnnnnnnnnnnnnnnnnnnnnnnnnnnnnnnnnnnnnnnnnnnnnnnnnnnnnnnnnnnnnnnnnnnnnnnnnnnnnnnnnnnnnnnnnnnnnnnnnnnnnnnnnnnnnnnnnnnnnnnnnnnnnnnnnnnnnnnnnnnnnnnnnnnnnnnnnnnnnnnnnnnnnnnnnnnnnnnnnnnnnnnnnnnnnnnnnnnnnnnnnnnnnnnnnnnnnnnnnnnnnnnnnnnnnnnnnnnnnnnnnnnnnnnnnnnnnnnnnnnnnnnnnnnnnnnnnnnnnnnnncgcctggtagtaaaaggatatgctcagagacatgggatcgactacagtgaagtttttgcacctgtggctcgttgggacaccataaggctaatcttagctttagcagcacagaaaggatggactgttttccagctagacgtcaagagtgcatttcttcatggggaattagaggaagctgtctatgtggagcagccagaaggctatgttagcaaaggagaagagcataaagtgttgaaacttaaaaaagctctttacggcttgaaacaggctccaagagcctggtatagtagaattgaagggttcttcatgaaggaaggctttgagaaatgcagtcatgaacacacactgtttcttaaacatacaaatggaggtaaatgcttaattattagcctttatgtagacgatttaatttatacaggaaatgatgtggagctatgtgagaaattcaaggaatcaatgaaactagaatttgatatgagtgatttggggaaaatgaagtatttcttaggagtagaggttcaacagagctgtgaaggaatacatttatgtcaaatgaagtatgctggggaaattttagaaagatttggaatgggaggctgcaatccagtaaaaaatcctatcgtgccaggcacgaaattaataaaagatggtggagaagacagtgagaattcaaccttgtttaagcaaataattggcagcttaatgtatctatcagttaccagacctgacatagcgtttgttgtctgcatgttaagcaaattcatgactgatcctaaaacatcacatatggcagcagcaaaaagggttctcaggtatgtgaagggaactaccagcttaggagtgttttatagaagaagtgcagagaattctgaagatgatctcaaagtctacactgacagtgactatgccggcgatgtagaggatagaagaagcacgtctggttatgttttttttctaagtgaaggtgcagttgcatggagctcaagaaagcaaccagtggtgactctctccacaacagaagcagagtatgtagctgctgctgcatgtgcatgtcatagtatttggatgaaaagagtgctcaacagtcttggtttctcttcctgcaagtgtgttaagattttttgcgacaacagttccactataaagttatcaaaaaatccaattctccatggaagaacaaaacacatagacgtgaaatttcattttttacgtgatctggtaaaggaaggtgctgtagaattaattcattgtgggactcgtgagcaagtggcagacatcttgacaaaacctttgaagttggaatcatttacaaggctacgtgatctgttgggaatgcagagcatcaaaactataaactgacttgttagcaagtgcagtttaggggaggatatgttggaaaccagttgttttcgttagaataaagctcctgtcttttaggagccagtaagttagtttgttagtgcaagtcagtatagtttgttagtgctgactatgactaagtcattgttttgtaatttttctgttgttctgttaccacaatcttcggctaagaagatgtggtttgtttttccctgattccaagttgtaatggttatttaagccaaaggaacactactgaataaagtgtattttcacagttaaattgtgcaagatctttgatattataacagattcaacaccacttcttctctctcgaccggacccttccaatgagtcaaaacaacctccctcccttgatgaaaccattgaacgttgtattggagagtttgggctcgcccaactcctccaagccatccttgtgtcatttgcatgggtgtttgatgcacaacaaacattcattagtgttttcactgatgctgagccaaaatggcactgcacaagtgattcatgtacttcagtctccgacatttgccatcttcctcaaaattcatgggcttgggatagccctaaggacacatcaatcatatcagaatggggacttgagtgtgctagttcaataatcaaaggcctacccgcatcttcatttttcatggggtgcctcattggaggactgatgctagccacgcttgctgattccttgcttggtcgcaagaatttgctgtttctatcatgcctaatgatgtctttctctggattattcactgtcttctccaacaacatatggatctactcggccttgaaattcgttaatggtgtcggccgtgcaacaattggaacatgcgcccttgtgttatcaactgagcttgtagggaaacgttggcgaagccaggtaggagttattggtttcttttgtttcacgctagggtttttaacattacccgcttttgcatatatgaatagaggttcctcttggagaactctttatctatggacttcagtaccaacaattttctactccatattagttcatttcttagttcgagagtctccaagatggctttttgttcgcggacgtaaagaagaagccgtgactatactgaagagtattgctacggctgggagtagtggcatactcatgagcttctcaaatttggaattcgggaaagagtcatggaatgttgatacttattcagcaatcaagattctcttaaagaaaaagtgggcttgcagaagactgttgacagtcatggcagtggtattcggtattggaatggtgtattacggcatgccattaggcctcggaaatttgtcattcaatctctacttgagtgtcacatttaatgccttgtcagagctacctgcctcattagtgacattcttcctcgtagacaaactaaaccgaaaggattcgctgcttgttttcaccactctaagtggggtttgtagcatcctttcagttgtgatgggcgagacatctgcaaatctacaaatggggctggagctggtatcttttttctgcgcatgtacagcattcaacatttcattgatccacacactagagttattccctacatgtgtgaggaattcggcaatatcaatggctagacaatctcttgtattcgggggtatgttcagtccggtgctggtggcggttggaagtaagaacaggtttctgtcatacgggatatttgggatggtaatagggatttgtgggttgtttgtgatattcttgccggagacaaggggcaggacaatttgtgacaccatggatgaggaagagtacaacagtacaaacaatgatctgcctgtgttggggtgactcacatctagaactaaaattgattttcgtgttggctggctggtgtagtaactagtagtagctagaatcattttgttttgaaaagataaatatagtggtatcttgcataatcaaattaagttgttggctttgcaagtggccactggtgaaatgatattttgtgcattgcagacggacttgtaatgaagtttgtcttcctctgagaagattccgcgtgtgtaacttcattttgttcgtcgacaagcaaattaatagacggcgtggaatgattttttttcatgtatatatggaataatgtatggagacatgaacaaaacttttggctgctagtaattatagaaattttgtctttttcaaaaaagagtaaattaagttaattaattaatacactaatattgccggcttgcttgttttttggaacaaaaaattgcttatagatgttttaaagcttatcttctcgacgggcagccgccacatggccataaaaacgacaccgcgactttgtctctcttatctgtttgcttagtcatccactcgaccagtaacaaaaactagaaaatatcttacgtttggagtgaagtgcagggtcctcattcgagccctgtttgtttctgtgtttcaaaaacgtttttgacaaaatttgaaaattttttatttttttattaacttgaaattaatatgtttttagtgttttcaaatcattttgatgtgctgatgtcaaaaataatttttaaaaaataaaaaaacatcattggcatgcattttggcacgaaaagctatttgaaaagcaaccgcaaccgcaaccacactgtcaaacaaaccctcaatagcgatatttatgtttttatgtatttaaaaataatcaaaaaaaatttaaaaaaatattattttgatatattttttatacttcaattacttataaatgatttttggtgcttgttaacgtaatctaactatattttttaaaaattaattttttattttaaattaattttttaatgttattttttaattttaatttgttgatattaaaaataaattttaaacaaaatagatgttaaataagtggagaatgaggtgtcaaccactaaccctaggccaatgcattcaagatgtaggtccacttggagtgaacagtgcccaattgaattatattcacttggttgcagacgtgagagttgcttctcacgaaacggtatttcttcaaaaatatatatggattccacatgaaaagctagttaaatttttatattatcaaatttgatatttatacggtgagttttaaaagcaaaagttaccgtgtaaacaaatacctacacctggctctattgaaccgttatttaatcttcaatgggcttgctcctaagtccgaaactaatttgtcatggaattgggggcaggggtacgtgggcttccgtattcacatttaaaccaacgcggattaaaggggtttttttttgttttaaaagaataataataattgttttttaaaatattttttatttataaataaattaaaataatattttttatttttaaaataatttgcttttgaagaaaaactcctagctagataaaaaaaaaaaaagagagccaaaagccgtagcttttccaaagggtctgatcaacctgcttgcaacgacaaatacaaataatttcagtaactcttcgattttatttctatgattgttatggttgaagccccgagtcttccatgtccaagagatagccaggttttataattaataagatagtaagtagtgatgggatattttttttataattaaaatcgaattacgtttttgtaatagttgttttatgttggagttttgataaaaatagatttaaaaaaattatttttaattgtgattgatttgatttaaatagattttttgtttaaaatgtatttgaaaacattgttatgtgaataacatattaaaattttttggttaaaactatgatctaaataacttaaattattaaaaaaaataatttacacaataatcatatataatacattggaataataataaaaataaaaaaagacattgaagaataaaaaatagttttcttgcagcagtggcgcttgtcatcataaatagagatttctctaaaaagactatatattgagaaaaatattacttattttaccagaatcttggctcagtaatgtgttcttacaataaaatttcaagaaaaactaagatagtagctgatgatttctttttcaaaaaacagtgaatgaacaaacagaaaattggtcctacctctgcaaatctctctcccactccttcatttaccattgaatgctgatcttacatgcactgtacatcattttcgatattaaaacctctcaactcttttcaaacgtttaattctaaaaattaagaactacgtacaatgatatttgtgtttgtgtgtgattgttacgtgccaagctggctccatgcatgaatgcacgatatttgatttagtcttgatgatcgaaatcttatacaagtcgtaaaagcaaatcagtcaagtcattgaagactaacgtgcttagttttctttgaagtatagaggaggttgatctttgaagtggaatctgctttgcccacagcaacacttcatttgcaaagctttatcgatcacaagggttgaaaagctgttatttttgcctataaactactacgcagcctattcgtcagcactcgatcgacaatatattcctgaatttaatactatttttctgtctgattaaacagtagataagttgctttcaaggttctagacctcagttcatgcacatcgttgttaagtttatttcatcaatcaactgcgaaagcaaaggattatatatattaaaaaagagtaatgatcatggccaagaaaaccataaaacagcattcttgctggtgttatttgcttggaaaaattactaatcattgttacaagaaaagcattaattaatttttagaaaattagtaaggccatgtcacgaataatcaatgcttactaattaaagtttccaggacagcatatttcttcagtcaataaattacttgaaacaatcaagccacctctaattagtgacgttattagtaatttctatcaagataattaataatgtaaaagataaacttgcaaaccaactaggctaatcccttagaaattcaattgtatagggattgatcataacacgctataataatatttttttatgaattaatgcactataattattttatgatttttttaaggttaaaaagtgtttataatttggaaaatagctgggtgacacagcaaagagagcatttttagggcccggaggaagtgaagagcagggacggagccaggttattaggttaggagggggggggggattataaaaaaaaaatatagggggctaaaatttaaaatttattttcaagtggtaatctaaacaatacaaaaaatacaacaacaataaataaattattaaagaaaaacacaaaaaaacaaaaaaaaatacgcctaagactatttgaatgatcaaataaccaagtactgatctaataaaagacaaacctaaaaaaacaaagaaaaactcagaagaagaagaagaacacacaagctttaattaaaaaagaaaaaaaaagcaagtttaggtgaacctcttaaacctagtctaaattatataatttgcaattcgttaaatcctaaacctaatttcaattaagaaatttaactctcaatcaatttaattttaaatgatgaaatcgttaaaaaatattaataaaaaaacttgcaaaagcacaaagaagtgagaaataaaatgaaaataaaatttgagagaaaaacctaaatatgatgaaatttgaaaaaaaaaaacaattcaaataaaataaatagaaattaaaataataaaaaataaaatttaaaagattaaaaaatcacagggaggtaaaattaaaaaaacatatgtaatataatagattatttatagattaaaaaataatagaagtgaagtcgaaaaaaatatagagggttgacccaataaaattaaatagcaaaaaataaaaaaatattagcttaattttttttattataaaaaataaaataatttatttttttatttataaaaacctttttttcattttttatatatatatatataaaagtccatctcacagtaattttagacaaaaatatttctttacttttaaaaaataacgtaatcattgtagctacacaatgccaataacaacgcttagtcttattgtaagaacctactcaaccaatatagattgggcagagataatgttggcccaggaaaagcaaatcataagaaaaggtcgcttcttcttgaaaacacatgttttcttcatttttgggctcaatgaactgtaacgaaatgatggaagagcaattgacaccaacgcactcaattagacctagtgctcatgagtgcacctcaagtttaaattccaccacatttccgatttgtctgcttttagggtttttgttgaattcttcttcgtatatttagatgcaagacatgatgatgaataaaattaggcaacgacaatccacgtcattagaaacgtaaactgaacactcaaggacgccttctgctgctttgcctcctgactattctaattaattagaggaataggcccgctggttagtgcagggatcttcgcgcaattcaattcaatattatatattaagaaaataccagaactatatatgggtaaatcgaaaaataaacttaaatttataatagaaaacaattttaatataaaaaaatcaactaaccaattattgagtcaccataattaactcatctgacccaacaaagtcttaatactaggaaatggaccgcttgatcaatctcccagaaagttaacacaacaaaatgcattactgccctccatacacaatgttttgccacctggcctgtattgctcggaaattcatgcacttgccagtcactgtattttcttcccctccaccttaattcctctgggtcgggtagatgtgaggacatgtcgtgcccgactcaaaaaacccagcgtgctggcacatactagtagtaggcgaacatatcggatataaattgagatctttcaggtgagaggagtgatgggattaattcctcaacattttatgttgagctagctagctaattgaaggatgcaggagtagctagttgaatcagctgaggaagggagtggagaatagagatgggccataggtgctgcagcaaacagagagttcaaagagggctgtggtctcctgaagaagatgagaagcttgtcaaatatatcgccactcatggtcatggaagctggagctctgtccctaaatttgcaggtataaatgtgtgtgtgtgtgtgttaatacccctttttttttgcatgcattagaactcaaaatcaagctatctgatccatttttgacgcatactttgctttgtacttgcaggtttaaaaaggtgtggcaagagttgccggttgagatggctgaactacttaagaccagaactcaagaggggttgcttttctgcgctagaagagcaggtcatcatagatgctcatagaattttgggcaacaggtaaggattaatatttgagtctaaataaggaagtgtataaaaaggtagaaattaaaataaataaataaaaacactgtttctaacaatggggacggtagatcactagatgacatgaatagagtagaagaattacttagcctatatattctttcactgcattttgattacaagaactttatacttgtaacagatggtctcagatatcaaaacatctcccaggaaggacagataatgaggtgaagaatttctggaactcacgcataaagaaaaagctcatggcacaaggcttggacccaaaaactcacaacttgattccttctcatcagagggcagctaataaggttgcatgcaatatatcaccatctaaccaacaacccctttcaattatctcccaggattcaaagatgaaagatgtttccatggagataaaccctcctattctaacactagcttccccttatcgttctcatggcagcactcgactttcgttgcttcaaacaacaaccggcttacccttgcccacctcttgctatgataaccctagtgtcatttggaatgtaaatactcaaaattcttatgattcttccctttttccttgcgtgtcatccattgagaactcacgcgtttccccttcatcttcgacttcggtgaacccaactgggtttggtctcctagatgaagattgcttttggagttgtagtaacattgttgagccctttgaagccacaaaattattcgaaggcatgcgatcacaggatcaagaaaaccagctgaacaagatttgtgacacacaaatcgttgataagaataaaggagttcatgataatatggatgcttcatttgacacctctagctatgatcttgagttggtcgactccacattatttcctggttcaatatgtcgtgatcttggctccatggatgatctttcatggaacttttaggccaccatatgcgtgtatgtaactagcgctacagtaatagatagtaggttttgctcaggttgtgcatcccatatatttgataaggaaaaaacgcttccatttcttgctaacaattcgggtgtgaaattatttgtgataccactcaattccattattcatctaaattgggaaggtgctcttggatgttgagtgatcatagatagccatcgcctgaattaattttccccaaacgcatgttctccaccatcccgtgagttttgatgccatgagaaaattttgattaagcctaatcctgtagtttgcctcttaatttatttgtgttcatccatcaattttgtttttatattttcaatttatccttatatatatatatttctagtttgaattaactgagacaattactaaaatttatatgaatcaaacgttagttttagataacatgagattaagtaggtcggtcgaaaaaaagaaacaataaaaaaaaaacatttaggttagaaaaggtaaataagttttttttgttattgccgttgatataccaagttagagaaggcgtctgtatttataacgaattagataaaaacattgagcataatcacaccgtaattatttttaaatgaaaaactttgtcatcattgtaaatataagggtaaatttttgaatttgcctcctaaggtttatttattatcttgatttatttcaattagacctcatatctttcatttttattccagtcaaccttgtatctttcaattttgttcaatttttcttttttgttgagcgtaaattttaatttcatccctaaatttataaaatataatcattaaatgagtagagagaaaataaacgaattggagtcagaaaaaagtaagggatttcatttcttttttagaattcttagtcaagattttaatagagaactggataaaaaagtataaatatatttgagagtgtataagagacagtgatagtgatggttgatactttatattaaaaagtattttatatcatattaattataagttaaatttaatcttgtattgggacggtgttaatgaaaaatatacctttttatcatattttttaattaaaaaaatgtctttctttaattattttttaaaactccaattttttcattcttatattttgaattatattatgatattccataaatcttaatgataaatttgaaatttacaaagagtggaataaaaataaaagatgcagagtttaattcaaacaaatcaaaagttaaattttttttgaataatcatcaattaggaatatattaaaaaggccatagagttaatagcaaaaataaaatacaggaacatgattaaaaaaaagttaaaactgtagttgagaaaatgcataaaccttgagaagttgaatttcaatttaccctaaattaaatttcaagaaaagggatatcatgagcaatattattcttatatttattttgtgggcgtaagataatgcttttcttcgttgctagtaaaagcgttatgtatgtgggtattggctcactaaaacaaagaattaatctaattaggtgcatatttagcccccttcccttcttttttttacattaacacccttagatataaataatttgaagtccattagctagacggctaattaattgggccttcaactcgctcccctggccactgcctgatgggtcaattctaattacctagcccgtgatgattgtggtaccaaagttacaaactgggccagtatcgaaaagcccatgtattcgtttacttgacccagcccatacaactctctttcttttctggttcccattggcttgaaggcggaagcagcccgcatggccatggcccatgggactctacctgcagcctccgtccccatccacacaaatcttgctccactgacctgggcgatgaccattcattcggttcttcctttattaatgttaattttcttgaaataccgcttggattttcggaattacatttctaagagggaaaaaaaaaaaaaaactgtgacagcactcgaataatttgttctgaaattctctatcatgattttttcaccggacaattttatcaaatatttcgaaaatacaaaacctgaaatgcccttgattttatggtttatttactgttccttcagcgcgcctatctggtagcactggggacctcaatattttgcaaacaatcttacttttcttgctactgtcatgtggtgtttctatgcattaaaactataatccttcttctcaaaccgcttaaaaatatattaaaaaagtatggaaattaacttcctgaacttgtagccgaagccactcccattctagtggatgtacattcatccgtaggtttcaaagaaaatgcatgataatgatacgagtctccaacctcctacgtccaatatttttcccctttcgacatttaattacccgaagcttttttcttttctttgttgccgatacatatccaagcagttaagttttccactcggcattgggactattattttttattttggctgaataagcaactcatcgatcatcagttctcaccagtataaaattatggagtcccctaagttactgtgtgagcattatgggctcacaccatgatatcacggcttctttataacagggaaatcttttgtgcttttactttggcagaaacagtacttgattataattccacagtgaaacagagacacgaatttccttttccaatctcttttcaaagctggccgagaagtttcaacaattgtatgaaaaaaaacgaaagataaaaacagaaaaggaaacgatggcatgccttgacccatccttgtctaatgaagtacgtgtataacctgatcatgtggttggcaaaataatccccatttttttcttcttttttatgcagcccatcacaatatatcctacctttgtgcagtcaaatgaattttagtagtgatacaacaatatctgtaaggaacattaacaaaaaaaatatttgttaccttgtggtcatcctaattagtggctcttagtcttgcatggggagtacagtattggagttgtcttgagaggaacataaagagaagatctcttctagtgttccgttcatgcaatccttgtacatcatgtagtcgtcgattatttcaggcttcgatggcttcatactctcggtgatactaatctgtgggaaatcctcaagttctaaaggtgggaacggaaactggtaatgcaagcttgagcagtttggcatctgcatatcctgcatccacagcatgtcgtgtgattaataattggtctcgtacccaaaaaacgagagagagagagagagagagagttcagaggagagttggaaaaagcaactccttttgaaaattaattaaaacagtaaacctagcaacatgttttgaattggaaattatttcaaaatgtgattcaaatgggggaacatatgcattggaaatggtgatgtttgtggtgtcacatatagtagacccagagagaaaaatcaggaagaaagatgtttgaactttgaattatgttcgagtcagtcaaaagaagttattggagatggtgaaaaaaaagctaatttgagtcagtgcttgagagatttttagaaggaagctttaagaaaagacagggagtttcattgcttccaacttttgttgctttaacttaagatcaaaagaaagaaaaaactcaaagggcttgtgttgtgggccatttccaacacatactggcccgaggattgtactttcattctctgcgtgaaacacaaccacgtggtattttccatggtgtgaacatgaagctttcgcatcaaggcagaatattgctggaaatgtggtattggcaaaagagatgatcatatcatgatcagaaaaggatgacttggagaagatgattattgcatgtgaatcttggcatggcccataccatcaataacctaatgtttttttattatccttccatgtcacacacacttaatattagacatatatatatatatatatatattatatatatatatatatgcagttaactaaataattactaattcttggaccgacattaactagttatcagcagatcaaaccataaaaaaattaaattaatgtgtaaaaggaaccttgtttattgtacctgaattagatttgacgagaaatccacgcccattgaataaaggctagccgaactgttggcttcatctgagggaaacggagcttgtaaatcatcggctattgcagtttcaattggagtcccttgagtgacatccgaggaagatgtttcagatggaaatttacaataatcattgttgaagttttcatcttcagcttctctccctttagaactttcaataccgcttgtgtcatcccctaataattgttcttctgagacccacgctgcatccttctcttcattcccgttatttttttcttctttctttttcggaatatgtattgttttcttgaaaacacggcataatgcgtaggaatcctgtggtgcaaaaataaacataaatttgttaaagagaggtgtacaaagatctgtaaaagcaagatcacaaagagcagaaaaggaaacaagaaaccaaacaaagatagttgtaagtacacctaaagtcatgaaacaaagactctttcatcatcatatatgttgatgataaggtattctttattaaagagagaacatttagcaggaaaaggaagatctaaaatgatatgttggtgtatgaaaacaagagcaatgactaaatgtgacaggatctgctctatatatgtgtttgcgtatctgtcatgtaaagaagcataatccatgatggtttttcctcgcttgactacataaagtcctggcttaatttgaaccgtgctactgctccctgtatataatatgctcttgaaaatgaattcaaaattgtttctaaattttttaataatttgaactggaagaagctacatggagcactgaaattaatattaatattaattaattttacccgcatctgaaagatgaacataacatacccctaaaaaaatactctcaatttacatcgatctgtcattgttactaaggtttcctatgagaccaaaaactctcttgcagcctcgtgtaattcctattgaaagttcatcactatatatcttctacacaaaaccgacaatcaaactcatttagttgtctttttgtaaaccctaatagcctgttactactggtctacatatatatgaatgccaccaaaaccaccagatggggcagatccaacttcatcatgatgcatggctcgatgttcataattaattaattcacctacatgatatttctgaacattaattatgcaatgggttaaatctgtgtccctacttgatcaaatgaaaattgtgccgcaagcagccagtagtgaaagtgcaatatatacctttaaacttgatggtgcagcgccacacaatgagtcgatcaagcgatactcatgcattacccagttggttctaatgccatggggagctctacctctatagtacaccaatgtcttcttcatgccaaccggccgcttttgagagttcactggtctatctttccctgtggctttccagtaaccagcttttgttgccctgttggttcttgaaccattagggtacttcttatccctagggcttaagaaataccactccaaatctttgcttggtaaaaacgacttatctgttgatcgaattatcacaaaaaaggttgtcagaaagaacactaagagcatacataagaacatatgtaggtgatactaaatattattgacgtaagcatggaaattaattaattacatatgtaaaattaacacgtacctggtaagtcccatggctcacatttatagagatcaacctctgggataatttcaagctcaattgtgcggccgttgatttttctatcaagatagtaaacaacaagctcttcatcggttggatggaacctaaatccaggagggaggctcacgggcgccattgctgtgatgacaatgatcgaagagaggaggggtggggggaggagggaatagtggcccaattgatcgagaacgtctagatcgaggatagcatgttagtactaaactggcttgtacgacatcgaactatataggccactgttttgttatgacagagatggtaacgttaattagcccttcgactttttatgtattacgttgctgccattcactcaagagaccagacctgacatctttaattaattcccctgtcccttccttaatacactagatttttttgtcccttcctagatacacctatcagaaaaatgtttttagttaatttaggagaggaatattatgatgtaaacgaaggggtatttatgttgataaaatgaattcgggatattatacagcaacaagtccttcggcttttggagattctgtgagtgaggctctgtgtgaaaacatcagggaggataagcagcttctctgcttttgtctgctcacaaactaacaagaatcagacccctcgagaggatgcgtgggccaactaaaccgcccatagcctacaacacgcaatactaggcctccctcccccttcttattttaataaacagtactgtgtgtaataatcacattattgtataatatatagttctttattggagggagtttttattgtttattatgtgtagaataatagtataatgatgttagttatcgttgttaatgtgtgtttataattcatatattagttgtgcaatctcgcccttgtacacttgtcgtgctgtcgtgcaaaggcgacctggctagataaaaagagaggcctagcaatcagtctgtagctcaagagaatctgatcgggaataggatgatcatgtgccatttaccaaaaagcaacgtgatgaacaactcatgttctctgctgccttggccacatacagtgtagttcttgtaagtttcttgaaatattcatttctttattcattcttattgaatcaatgatttgtttaatatatagtaatcttaaatctcttgagtggcgcagctggaaacttagagagattcagccgtgaaagctctctctctcaaaaaagaaaaaagaaaaaaagggaaccatcaatgaagatatttcataactgatgatgatgggattccaccttatatccaaaatcaacatctgcatttgtagtatagtatgcttggtacgtagcgtacgaattatgtaatttaatgtttaatggcatctttcaatatccttgaattattgcacatttttgtactatcaatttaatcaatatttttttgatattttaaactaaattttttatacatgccaatgagaatttaattcactttcataaataattcaaagcttgttaaagtcaggaagtatttttttaaaaaaactatcatataagaccaaaatgtaaactttcatggagattgaggtgtcatcgatcgcataattctcaagcaatattatacttttatatttcattttaaaatatttaaaactgtaatgaaatgaatggttatgatctttaataatttatcattaaaaaaacgtaggagtgttacataagaaaaggtcacgaaaggttactaatgtacaagaatcgattcttaaaagatgcatggcattactcttgttgaaaggcaatggtatatatatatatagtccagagagaatataatatgtatatcaattgtgtaattcaggcactacgtatattgtgctgcatatatatatatatatatatatatatatatatatatatatatatacacacatgttatataattaataatgaattcagtacacttctagttaaaaacacgactgatatccatgcttttcttcatgcatcctgattaataacaattgtacgttgatgatgatcacaattaaaaaaatgacaggcctattttgcattatggcccaaagggtaatgggtggagccaaaagtctttcccaaattagagctacgaatctatccctaattaattaacaagtaaatgtctaaaattttcacctgaaatctctacgtcaaactgtcaaagtggggggaaagtaggctagttggtaaagtgtttaatgcaaaaattatctccgaaaactgcatgcatatacaggatcaaatttgatgcagatcaagagcaagatatattaaaataaagtaaaggaattgaaagattcaatatccatggggaaaagggagtaaattaaagatgtcaagccggcgaaaccatcgtcgatctttgtttggaatgcgtaaaatagcacagatttggattatcaaggtggggaaaacacgattcgacctgtgagcgttcttttaaatttctaaattttactttcgttggtccacatgtgggtgcatgccttcagtttaacgtaaacaatctgggaatttgatgggccatatgatgggcccatgtgaaaattctctggccttcttttattcccggatagaaaggaacgcttttatcattcaacagttgatgacttgaaggggcccataatagaaaatctacctggcacaccgtcacagcctagaaccctagactctctttttctttttgttttttttcgctttcttttcctgccatccaaactacttgtcctttactgttttattctgtttctattaacctccccctttgattcctttcctttccttaaaatatcatttccagacgagtaaagacatcctaccaactttaatgattacagacccaaaatctttgactgctgtctgatctctctcttttctctcaaactccaccgcaatatcatcgatcgatgtactcctttggttctaacttctaattatatattccccccattgatgcagaagcatgatcacaaaatacatagcgcaagggtttgatatttgcatgcacacacactcttagctccacagtttaccattttaagcacagcaaaactatatacaatccaagctagttctttgatcggcgtgaaatcgaaatatacatgaccagtaaattatagcagcacgctagctaactaagatgaccaaacccaaatgtctctctagtttaatttgaagtccagtacaccgggtaataattaaaacacaacgggccggagaaaacatgtagtttttattaaaacgtaagctactaactttgttgggagttccagctttctcttgtttggatgagtctttatggttcttacgctcaaaggtggatataatttgaattaatttttgtgcgacccaattaaattgagaaagagagagatgtagggtttcaagggtcttttgccgaaagatccttttacattctttactagccacactccacaatattcatcacgtattaacatagatatagtagctagcttcacttaagaaccttgtcaaccttgtatgtgaattaatatgcatgaacaagaagcttttgattagcataaaagagattccgaattcttctttttcaccaatgggattgcgaaaatatggtagctagctagacgctcctacatgtaaaagaaaaggaaaaagcaacttgatccatcaagttctaactagaagttatagtacccacattttgattctcatatacagttacgtagcttgccatataccacatgggtttgattcattctttattaatatagttgtgtttctttatttcagttgtttttttcctttctcaagaatgatagacagtagtgttgttatgttaaatggactctaaagccaggcaacctttcatacgatctaattaattaagcaacagaatttttagatttatttataaaattttattaatggactcatgaataaaaataatatatcagaaaaattttcgtcggtgatttatggtatgccagtaataattttatagatgcatttactgacgaacaaagcgcgaaaaaaaaaatttgcttcattctgtcggtacttccatcgctgattatacaaaaaaaaactattgtcattccatcgatgaatttgacatgtaatcgtcaaacagaccgtatgttattctgtaggtgagtaaacaggggcagtgacatttacaatattttttttccaactctttgtaatatactgatagactatgtccgtcggtaacccctgtcagtaataatttaaaaacatatatttttaaaaaatctattaaacagaaacaaaaaaaattaaaaaaaaatcaaatatttattataaatttaaatatttacaaattcaaatataattaatctaaaattgaggtgctgaaggaggaggaggaggaggagacctatgtctcaggtgcctattcttgatcggcgcctgatgactcatggttgtcagaagcgctctagcagcgattttgttcatacaacatgctattgactattttctaggtatctatataaattaaagaattaaggtatcataaatcatttatgtttaaaaaaaaaaacggcagcacatttcctatatggaagactacctaaattttttaaaactacaaatacacaacaatttaaattggaccgtcacaaaccagttgattttatttcaatccatgttaatcgaataattttaattatattaatttaaccagattttcaattaactttgctaagatcatttgtgaaatgattataagaggttaatattaacacattctaccctaaccatactctttaatatgaaacacatattcattgaggaaatacttgttatagcacttcacttgccttttaagatccagacttaataaattcaaagtaaaactagcattctctctcaattgataaatctagtacataaattatatcttcatcacagttaaggggaaatgtgtaatgaaattaagtatcccgagagataaggataattaactagtccttacttgtgttctgaaccacatggaaaattgtttatcttgtagtcgaaagatttgggattcagtcaaccgtgagttttcgaccaataaaaattgatgatgttacctatgagaaattcatcaatttatcaatttatgatagcataagagataaattattcgaaagtaacaacatatggagaattttacctactgaataaaaggtcttagttcatcgcagtttatcacttataaattaaatattatagacaaatttaaatctaccggtaattatatctgtaaaaattacttgttattgtattttttggttattttttatcttttttttttacttataattctctcaatatatatttaaaaaaatatttttattggtgcgtacggataaatactgcaacggcatgttcaatcaggaaaattcactataatttactaatggtatatttctagcgatgtgttatttatatttgttaattttttgatacgctgtgaaataaagcaacgggaaacacaagggcaaagagatcatggatcgatgcctgggtgtgatgtattggtggattgtaacagtagagcctagagatggcagttagcgatccataaagaataaagagaaagggattccaagatgtcggctctaaatctagcttccattttagtctctgcatacaaaagacaaatgttcgattcttcttccattacacgtaacatatacgaggtgtagctttcatggtatagctgcctatggttttgaatgcgttgtcatgacctcgtccatccctttctcccatgcccaaggaatagcgctttgccaaacttggacccctcacgtcacagctgagatttgaaagggaccatttccatttttccacaagaagtagcagcttgagagagaacggcaaatggacaaagcaatcttgttagggtatctagtcaatgtaatgatctctggtaataatgagaagctactcgaaaaatctgatcattcttggataattgtagctagctattccggagtagaagaatccccaacaaacaaaatacattattcttcaacaaataaataaataaaatgccgtgtgtgtgagatgatcggctatctagctatatatatagcgcacggcaaagtgaaaattgagctccgcgggcgttgtgtgttttcaagaatgaaccctgtttaatttaacgggtaaaaaaagaaaattggatctatctgcattcagatcatgtttaacccttttaaattatctagtcagcttgtactgttgaaggttcgaaactggtaattaattaacatcgcggtccattctacatttttatttgaaggtagggcagaggagtggtggttattatggccctcgatcgggaatatatttctccatccagtactacaggttaacggggatttctctcttttttaaaaaaacactctttcattaggaggttcggatcacaatgagtcctgattactctccatcattactgaattcccagttcaaatcgagatctcttgccatatttactaatttgattattttttatttttttattcgttttaatacgttgatattaaaaataattttaaaaaaataataataaaatattattttaatatatttctaaataaaatatattttaaaaaataacctgtatctcattattaaaaataaacaattttcaatatacctgtgttagcccaaaagtgattttatcatccaacaattctggcccataagttaggtgacatgtttgctggccattataccttgcccaaaagtaccaaaggaaaatcttgagaaaatacgggcccaaactaaatcacgcttctgggcctccctatctttgcttcaaactgcaagggccagccccagatagaatcactcgttaagttgaagcttcacccaggggaagatgtcgatactgtggaagaagagcgaggcctggaggtggatagtgaggatgacaagagactcaaagccattcttcttcgcattcgctgcatgatgcggtgtcgttccaggtgtgattgggtatttcgtgatgcaaaccaccaactcccgcaaccccgagctcgaagcccgcctccgttagaacgcgcgtcccgattcccctgtacgtacgttatatatatatatatatatacttgaatcaccgttgattttctccataaaaacgtttgatctgcagatttttgggcatggcccgctatttgtgattattgacatatcttaattcctgattattttgttaacttggttatttcaagaatctgactctgactctgatgctatatttttaagtagtttagcatcgaatgctagaaaataatatatgaaaagtacgttaatcactcatagatatcaagaggaagaatggaagggcggtaaagcttctgaaggatacctcaattagcatagagttgcagactagtcactggatacttttcatcttggttaagcttccaaatttcaatatatggcagatggatttcacaggtaaggccacttctaactgaagtcatcttttggtaatcacaggaatgaaagtgcatggcagtgacctcagagtagctgctttagatacttaggttagttcctctttaatttctgtctcatatcctagagttaagattgccccaaaatcttgggtcatggttaataattatcacccttttgatcttcaaatggaagtacatgttgacaaattttgtttgctcgaatttctcaatcagatgatgggtaaagttaatcgagagagactggcagaataccttggcgagctgcagcggaaagaggatacaaacgatcgctatgtagctgctctaagaggggagacatttacaagaaacccatatgtaaggattcagtcaatacccaagcggaataacactgaagctggcaaggagcagaaccttgataacgatcaaaggaagcagattagttgatggttcttgctgatgtgaccctttctatatttggtatattaatgtcatggcagcacaagaaatgcaaagtggtccctttccttcttgttacgcaacagcttgtagcctgtgttttatttggaatatttctgctttggtatggttttttcatacccgctgggaatgacagcaattatctcatattataatgtttctaatttgcttttggttttgcatcttgaacccaaaatgcttctcagctatttgcagtttcttggtagttcatgaagatgatgtcagtgcctaggcttgattccaggcctggcatacgaggcttgggaagaagtgacatgttttatgcacaagtgcatcatttataagtttttatcggtggatactatagttaagcatacaggatacgataataggactcatcgtaatcgcatcagaacgaaaggtaagtcattgatgaatttctcacattgcttacttctattcctgttaattttaaagttcaatgatggcagggaagttgattgagacagaaattcatacaactttaggctaaaagcattttgggcaccttcttaacttcgggtcaattttgctaatgagcagctgtttccctttcgaaaagcccttgcaaccccttgaatttgcagatgatcagtgtaaccctggggctaactccagtattggagttgagaaggaggttaaagacgtgcaggggtggcttttgacttggcgaatcgcttcccaaagccgtaaattatattctaaattacttacagatgaagtgattccacaagctaaattttgcagcatagcaaatatacatcattctcaaccgttaaaataagttctgcatcaactttagaaacagaacaagatacagagcgaagaaatctgactctgccttcacactcaaacacacgctcatgcgcatacacacaaacacgcactaaaagaaagcaagagaaccacatgtacagttcaagatacaattcccttgatccagtcgttaagcaaacagcctgatacggctggtgattggccggcggcatatagggcaactggatactctagatccacagtctctacaagtctacaaccaagcaacggtattagtatcgtaacaaaaaggttaagcaaaaacaaagctggcaatgtttatgtggcagctcaccatgtgcccacagccgaaggccaagtcctttctattagtcagacaaatagggcaggcctataatcaaattgaaaaacacatttcaaagttataaattatagacgagctacaatgttccagacaaaaagacagcattacacgagattattttcaaacctgggttctttcatccaagaccggagaagaaacatgggttggttcacgatctagcactggacgacgagaataaggaactggaggagggcgtggtacgattttctttgcttgtcccatggaacgtcttttatccaaaggccatttaaatatatgagacaacacgtaaaaacaaatggatggtatgcagaacaaagtggccagtgcattaggaatgctgggaaacgtaaaaatggaaatccttccattgctgttttctctttgaaattgaaagggcaagccaaccaattttttccatacccagattcaaaactaagacgtgctgaccagttttagaattggctcccctgctgaaggcctttattttgaaattttcaaaacgttttcaaatgctggcaaagctgtgttaaaaaaatggagcagtgaataaacaagtttatcaacctacccgataataccaaactcaacagctgctttatactggaggggaatctccatcagagcggctagagcaaaagctgtttctttctcggagatggttgcattttttgacataattgcagtgaaattaacgaactgcacacaattcagaaacaagttgataaagtgctagatcgtatattaaattaaatcacaatgttggatggcattcgaaattaacattcattttgttatcactatacctgaaaattgtcaaattcacgtgctgggagtttgtcatcaaatcttttcatgtcttcccaaggtccatcaccaactccaacaagaattatcgaaagtgggtatgaactgtttaagaatatcataaggttacacattgtaattgcttttcataaaagaaatggcaacacatttcagaataaacacaactccattttctggcattgttagaatccgatgatgaaaatcattagattcaactttacatccacttactgttgatacaggctgactggcatgttagggaacacaaaacaggtaaactcagtgcaataaagttatgaataactgactgtggaggagaacatgaagcaatcattctgcatcctcgatgttctgtgtggactttgagtgtttttcacatacaaatgcaatatcgagctggcatgacacaaacaaataactggataacaatctggttatgacgcaagataatctgtatacttactaggatctaaaagtagattgttgaccccttatgattcatttgatagtttacaagtgattgacatcgcaaaatgggatcacctctcaataaataaagacagtcatcagttgaccaccttctttttatgcatctgccaaagtcatgtacatctctatctaggcaagtcatgtaacaatagcaggtcaagtatagcagtctgtgaagtggaatgtcatggccattctagtggcaatgaaaagtaagtttatcaagcagctgctaatgattagcaaccctattccataaccagcataacaccaaatgtaaatgggctggcacccgaagcgcaccaagaaagtgacagttctaataagaacctaagttcgtcattttaattagatgaaagttatagtatgacactaggatatattttctatgaatgttagtctgagcaagtttaaatgatttgcatttatctgtaaggctcgaccttgcatcgacaattgccttgattgtttgctcttcttgtggactcatttctccatcgcctgtatccacacttcttgtgaccttcacagaaaaagagactgttactttgattccctatgcatccatccatacagaaacaaacacatgcaagcatgcagaaaaggagagagggttttgaattcaaacctggccatctgcaatgatgagcaatacatgatattggcctccacttttttccacaatgtcaattgcagcctcaatcaccggtccatacgaagtcggcccttaaaaccaaaacatatatcggtgaagatttttgtggcttgagaaataagtaaaacacaagaatctttgtagaagtaatgttcaaccatgggtctaattaagaaaactaaggaactgataaaagaccaaattccaacgtcaaataagcaaggaacaaacctgaaagtcgcaagtttggaacaatctttttgtagcatgccaagacttcttcaaaaccatggcaaggtgaatgatcactgtgaaagctaaacacctcttgatcatgagtggtggctgtatagataaaaagaaaaatcaaatcaacagctgagttataaggtgcaaaactagaaacaacattgttagaattcaacttccagggactgaacctaccatcaccaaagccaaaacaaggaattaagttgtcttcatcaaaaggagccatcgtctttccaataatagagatggctttctcatatggattaggtgtgtctccgatggcatgaaggctacgattattgaacgagactttgcctttaaaatgaaaatcaacaattgacatccatgagagacaaaccaattcaaaggaacagaaaacacgaggatataattgaaccattctgctatattattagattgccgcccccttaggtttctaaagattggtttttcgactctgaatacttatttcaacttcatggaagtctcaaaatccaaattcctgaataactgataaagcaaaacacaaattttatggtacaaatcgacgatgtgattagttcacttgcacatacctgtccattcattgcttttagtgaaatcaattccaacaacgagattcgatgattccagtccagcttccctcaaggctgtcgtaacctgtaaaagagggggggagcctgttagtagtagactgcgagaattcaaccgagtagccatatttttatctatactgaagcaacaaacttctgttattgaaattacgcccgttgctagcaaatgatttccatgcataatcaacaaagcaatacctaacgttaacaatttaatgctataacacatgacgagcgtttgcagaaggtttacaaaaagctctgcgtatttgaagttgcaacttgcacctcaccccttgaaccattaactcgactaatggatttttaaaattaaggtatatattggtcaaattaaagaataaaatctgaaatataaatttaagataaaatacaaggaccatattaatttccatcccaatttatttatttaattttggtcaaactgaacagtcgacaaaagcacagcagggtcccgaaacccagtagagttgactcggtcatttgcttctgttaatcaaaacagcagtcgtccacgtggatcacgtgaacacgtttacatttttctttgaatgattttctttttacagataccgatctaaaatgactagaatagtttataaatagattggaattgagtataaataataaggctaaagatgatttttgagcatcaaatctgaaatttattttttcatagttaataaaaaaatacaataattctactgttatatatataatcttaaaaaataaataaaaatattaagaaaatataatcttaatatatttttaattgtaaaacacttttactaaccactttacattatattattgaacacacattaaagcttggttcacgttgaaattgaatccagctcccgttcccaaggtgcaggctttggagaaatctttgtacgaagctcacttaacataagcttattcatataaattaagcgataattaccatgaaaatattgtagaactcgtcgagtcttgaatgtggactcgtgtgataatcgataatttattgcaagagataaagcttatgatttccattaaatttttaagtttcgatcattgaaaatgaaaatgagttgcagacttttttttaggataaattacaatagtttccattaaatttataataataataataataataataataataatctaaaatatgaagatattataacaaccaccatgagaaacatagaattatgcatgccaaaaatattaaaagcattttaaataaaaggatgaggtttttataatatttatttgaacgtgaggggtgtggggttgtatagggcctgtttggaagttatagttgcggttgattttcaaagtgtctttcatgttgaaatacattaaaataatatttttaaattttataaaatttatatttgaatcagtacatcaaaacaatttaaaatataattttttttaaatttttacaaacgtggatcggcctgcatttcaaatactgtctaaattaaaaaaaaaattacggtgttagtagttttatgatacttcaagatatttttgtaatttaccttagtttttgtactatattaatattcaaattgaacgtgaatgataaggtgtgagtctcgtgaattttaaacgactgacttctcctataataatagctgtcacgtgtgtttatagaaaaaaaaattgaatgagaaatctgtctgtaaaacattagtagaaaagaaaagaaaaatagatgaaatttgagaataaaacggactattttaattatgtagcctgtttttttataaaaaaaatcactcattcaattattattttttattattaatgtggtgtctaggccaacttacacgtaccttgactaatctcacggattctaaagttaataatcatgtaaatttctaataatactagagtttataaaatttaaactagtaatatttaaagaacaaatctagaaactgattagttaaattatatccctcgagattcagtcagtcaattacttgaaaaccttcaatagtgcctggggtcaccaataatacttgatgattgaaaaaacttgcttttctttattatcttatctaactttcacgtttccattgagaagaagacaccgtgttgacgacgtgatgaccaaaaacgcgttagctttattgccagtggttggcaataatggcccctctcttctctcagggaatcatgacatgtggagtgtatactttctttcttgtttcataattgacaatttcaacttcgatttttatgaattcatatcgaatgtttcagtgaatatttgttaggaatttgattaatatttgattaaatgatgttatgaataataagaatttataaaaaaattaattttatatttttataaatttaaaaacacttttaaatcacatataaatataatttcaaatgtaaaaataaactatacatatgattatatctttctttttctttgttttaaaaaattgtattctcaccgtgataatttgaagttgttttgatgatttaggactgtttagaaatgtggttagattattttttttaatgttttattattttaatgtgtttatttaaaaataaaaatatatattattttaatatatttttaaagttatgtttatttttgctttttaaaaaaattaaattttttttattttttatttgttttaaattaatatttttttaatattttcatattattttaatttgttggtgttaaaatattttaaaaaaactaaaaataaattattttaatatattttcaaacaaaaaaaactttaaaaaatcacacttctaaatatcccataaaaaaacacatggaaatcaaaggattaaaaaaaaacatgtttcgtgagtgtctgcgtgtgttccatgaacctgtatatcttaggagtgtttatccttggccgtttggcgccggaaaaaaaagaggttaagattaacgaaaaaaaatcagaaaaaataaataacgagttatttttcaatttattaaaaaataacaatatagctatcacttttttaaaaaaaaaaaaattaacatgatttttcttttcagtcctttcaaaaaaattcgctcttatgtggctttgttggatgttatcggtttgaataaaatgacagtattttacaaacaaaatgtcaaataaatacctattttcttcgatttgaaaattttcattggaatagcatttcaaatttcaacttaagtttctaacacttttgaatttttttaaaattgttttaatgtattaatataaaaaataattattaaaaaataaaaaatatattttaatatatttttaataaaaaatactttaaaaaacacagctactttattcctttataatccaagcgggaaaaaaaagaaggaaagttggcgtctggaccacactaacagtactgtcgtgactttgtttaacagaaaaaataaaaaataaaagcaccttgcgatattttgactggtcggatatcacttttccattattattttatctttttccatggagcattgtaatatttttttagaataagaagcaagtagtatttgaaaagcaaacgaaacggcatggagtggagtggagagtgcgaattgataagaagattcccctgagattccatcagggaaaagtcaaatcagacaaattgactaagatcgcaacggctaaccagacaaattttccgcaagtcatcaagaaattaatatccattctcttatcgaataatatgtgtgtgtgtgtgtagtttgctcaataagtggaaaattatctatcctgaatgaaaattaccagcaaggcttccaagaaaatgaaagaaaataattaaagaggatgattggcacgtacctgttctagggaagaaaaattatcagggatgaaactatatttctgcttgatggattgcttcttctccaatttggaaccaccctttgcttgactggttccctttgcttgactgctagtatcactaccagtggctctagcagtattactcagtgacgatgatggctccttggacat
